(19) United States
(12) Patent Application Publication
(10) Pub. No.: US 2007/0178475 A1
(43) Pub. Date: Aug. 2, 2007

(54) Novel human polynucleotides and polypeptides encoded thereby

(76) Inventors: Michael C. Nehls, Stockdorf (DE); Brian Zambrowicz, The Woodlands, TX (US); Arthur T. Sands, The Woodlands, TX (US)

Correspondence Address: LEXICON PHARMACEUTICALS, INC., 8800 TECHNOLOGY FOREST PLACE, THE WOODLANDS, TX, 77381-1160, US

(21) Appl. No.: 11/128,224

(22) Filed: May 12, 2005

Related U.S. Application Data
(63) Continuation-in-part of application No. 11/026,159, filed on Dec. 30, 2004, now abandoned.
Application No. 11/026,159 is a continuation of application No. 09/398,253, filed on Sep. 17, 1999, now abandoned.
(60) Provisional application No. 60/100,917, filed on Sep. 17, 1998.

(51) Int. Cl. C12Q 1/68; G06F 19/00; C07H 21/04

(52) U.S. Cl. 435/6; 536/23.1; 702/20

(57) ABSTRACT

Novel human polynucleotides are disclosed that correspond to human gene trapped sequences, or GTSs. The disclosed GTSs are useful for gene discovery and as markers for, inter alia, gene expression analysis, identifying and mapping the coding regions of the mammalian, and particularly human, genome, forensic analysis, and determining the genetic basis of human disease.

### 1.0 CROSS-REFERENCE TO RELATED APPLICATIONS

[0001] The present application is a continuation-in-part of: co-pending U.S. application Ser. No. 11/026,159, filed on Dec. 30, 2004, which is a continuation of U.S. application Ser. No. 09/398,253, filed on Sep. 17, 1999, abandoned, which claims the benefit of U.S. Provisional Application Ser. No. 60/100,917, which was filed on Sep. 17, 1998; co-pending U.S. application Ser. No. 10/914,016, filed on Aug. 5, 2004, which is a continuation of U.S. application Ser. No. 09/417,522, filed on Oct. 13, 1999, abandoned, which claims the benefit of U.S. Provisional Application Ser. No. 60/104,292, which was filed on Oct. 14, 1998; co-pending U.S. application Ser. No. 10/911,704, filed on Aug. 4, 2004, which is a continuation of U.S. application Ser. No. 09/421,813, filed on Oct. 20, 1999, abandoned, which claims the benefit of U.S. Provisional Application Ser. No. 60/104,977, which was filed on Oct. 20, 1998; co-pending U.S. application Ser. No. 10/914,037, filed on Aug. 6, 2004, which is a continuation of U.S. application Ser. No. 09/428,674, filed on Oct. 27, 1999, abandoned, which claims the benefit of U.S. Provisional Application Ser. No. 60/106,442, which was filed on Oct. 30, 1998; co-pending U.S. application Ser. No. 09/560,863, filed on Apr. 28, 2000, which claims the benefit of U.S. Provisional Application Ser. No. 60/132,408, which was filed on Apr. 30, 1999; and co-pending U.S. application Ser. No. 09/563,817, filed on May 3, 2000, which claims the benefit of U.S. Provisional Application Ser. No. 60/132,343, which was filed on May 4, 1999; each of which are herein incorporated by reference in their entirety.

### 2.0 CROSS-REFERENCE TO SEQUENCE LISTING SUBMITTED ON COMPACT DISC

[0002] The present application contains a Sequence Listing of SEQ ID NOS:1-5,504, in file “seqlist.txt” (3,137,536 bytes), created on May 12, 2005, submitted herewith on duplicate compact disc (Copy 1 and Copy 2), which is herein incorporated by reference in its entirety.

### 3.0 BACKGROUND OF THE INVENTION

[0003] The Human Genome Project and privately financed ventures have succeeded in sequencing the human genome. The hope was that a comprehensive representation of the human genome would thus be available for biomedical analysis. However, the data resulting from these efforts largely comprise human genomic sequence, of which only a fraction encodes expressed sequence information. Although sophisticated computer-assisted exon identification programs can be applied to such genomic sequence data, the computer predictions require verification by laboratory analysis to actually identify the coding regions of the genome, and to identify exon splice junctions. Thus, the availability of cDNA information will contribute notably to the value of human genomic sequence, since cDNA sequence provides a direct indication of the presence of transcribed sequences, as well as the location of splice junctions.

[0004] Thus, sequencing of cDNA libraries to obtain expressed sequence tags (or ESTs) that identify exons expressed within a given tissue, cell, or cell line, is currently in progress. As a consequence of these efforts, a large number of EST sequences are presently compiled in public and privately held databases. However, the present EST paradigm is inherently limited by the levels and extent of mRNA production within a given cell. A related problem is the lack of cDNA sources from specific tissue and developmental expression profiles. In addition, some genes are typically only active under certain physiological conditions, or are generally expressed at levels below or near the threshold necessary for cDNA cloning and detection, and are therefore not effectively represented in current cDNA libraries.

[0005] Researchers have partially addressed these issues by using phage vectors to clone genomic sequences such that internal exons are trapped (Nehls et al., Current Biology 4:983-989, 1994, and Nehls et al., Oncogene 9:2169-2175, 1994). However, such libraries require the random cloning of genomic DNA into a suitable cloning vector in vitro, followed by reintroduction of the cloned DNA in vivo in order to express and splice the cloned genes prior to producing the cDNA library. Additionally, such methods can only “trap” the internal exons of genes. Consequently, genes containing a single exon or a single intron are typically not trapped by traditional methods of exon trapping.

### 4.0 SUMMARY OF THE INVENTION

[0006] The present application discloses novel nucleic acid sequences that partially define the scope of human exons that can be trapped and identified by the disclosed vectors and methods, and are useful, inter alia, for identifying the organization of coding regions of the human genome. The Sequence Listing is a compilation of nucleotide sequences obtained by sequencing a human gene trap library that at least partially identifies the genes in the target cell genome that can be trapped by the described gene trap vectors (i.e., the repertoire of genes that are active, or not inactivated).

[0007] The invention thus provides isolated and purified novel human cDNAs produced using gene trap technology. The novel human gene trapped sequences (GTSs) of the invention are disclosed as SEQ ID NOS:10-5,504 in the Sequence Listing, submitted herewith on compact disc. The invention further contemplates the use of one or more of the instant GTSs, or portions thereof, to isolate cDNAs, genomic clones, or full-length genes/polynucleotides, or homologs, heterologs, paralogs, or orthologs thereof, that are capable of hybridizing to one or more of the disclosed GTSs, or their complementary sequences, under stringent conditions.

[0008] The present invention also contemplates methods of analyzing biopolymer (e.g., oligonucleotides, polynucleotides, oligopeptides, peptides, polypeptides, proteins, etc.) sequence information, comprising the steps of loading a first biopolymer sequence into or onto an electronic data storage medium (e.g., digital or analogue versions of electronic, magnetic, or optical memory, and the like), and comparing the first biopolymer sequence to at least a portion of one of the polynucleotide sequences, or amino acid sequences encoded thereby, that is first disclosed in, or otherwise unique to, SEQ ID NOS:10-5,504. Typically, the instant polynucleotide sequences, or amino acid sequences encoded thereby, will also be present on, or loaded into or onto a form of electronic data storage medium, or transferred therefrom, concurrent with or prior to comparison with the first biopolymer sequence.

[0009] Another embodiment of the invention is the use of an oligonucleotide or polynucleotide sequence first disclosed in at least a portion of at least one of the GTS sequences of SEQ ID NOS:10-5,504 as a hybridization probe or for chromosome mapping. Of particular interest is the use of such sequences in conjunction with a solid support matrix/substrate (resins, beads, membranes, plastics, polymers, metal or metallized substrates, crystalline or polycrystalline substrates, etc.). Of particular note are spatially addressable arrays (gene chips, microtiter plates, etc.) of polynucleotides, wherein at least one of the polynucleotides on the spatially addressable array comprises an oligonucleotide or polynucleotide sequence first disclosed in at least one of SEQ ID NOS:10-5,504. Similarly, one or more oligonucleotide probes based on, or otherwise incorporating, sequences first disclosed in any one of SEQ ID NOS:10-5,504, can be used to obtain novel gene sequence via the polymerase chain reaction (PCR) or cycle sequencing. Similar oligonucleotide hybridization probes can also comprise sequence that is complementary to a portion of a sequence that is first disclosed in, or preferably unique to, at least one of the GTS polynucleotides disclosed in the Sequence Listing. The oligonucleotide probes will generally comprise between about 8 nucleotides and about 80 nucleotides, preferably between about 15 and about 40 nucleotides, and more preferably between about 20 and about 35 nucleotides.

[0010] Moreover, an oligonucleotide or polynucleotide sequence first disclosed in at least one of the GTS sequences of SEQ ID NOS:10-5,504 can be incorporated into a phage display system that can be used to screen for proteins, or other ligands, that are capable of binding an amino acid sequence encoded by an oligonucleotide or polynucleotide sequence first disclosed in at least one of the GTS sequences of SEQ ID NOS:10-5,504.

[0011] An additional embodiment of the present invention is a library comprising individually isolated linear DNA molecules corresponding to at least a portion of the described human GTSs, which are useful for synthesizing physically contiguous sequences of overlapping GTSs by, for example, PCR. The invention also provides for antisense molecules that comprise at least a portion of a sequence that is first disclosed in, or unique to, at least one of the GTS polynucleotides.

[0012] The present invention further contemplates purified polypeptides in which at least a portion of a polypeptide is encoded by, or first disclosed in, at least a portion of a GTS of the present invention. The invention also relates to naturally occurring polynucleotides comprising the disclosed GTSs that are expressed by promoter elements other than the promoter elements that normally express the GTSs in human cells (i.e., gene activated GTSs). Such promoter elements can be directly incorporated into the cellular genome, or recombinantly engineered upstream (for example, about 50, about 75, or at least 100 to 130 bases upstream) from at least a portion of a GTS of the present invention, or a complement thereof. Additional embodiments of the present invention are recombinantly engineered expression vectors that comprise at least a portion of the disclosed GTSs, or complements thereof.

[0013] The unique sequences described in SEQ ID NOS:10-5,504 are also useful for the identification of coding sequence, the mapping of a unique gene to a particular chromosome, and can also be used in addressable arrays, such as gene chips, to identify and characterize temporal and tissue specific gene expression. When the unique sequences described in SEQ ID NOS:10-5,504 are expressed in mouse embryonic stem cells (“ES cells”), they provide a method of identifying phenotypic expression of the particular gene, as well as a method of assigning function to previously unknown genes. The unique sequences described in SEQ ID NOS:10-5,504 can be further used to identify the gene of interest from many sources, including, but not limited to, libraries consisting of cDNA or genomic clones, and for the in silico screening of nucleic acid and protein databases. The unique sequences described in SEQ ID NOS:10-5,504 have further utility for genetic manipulations such as antisense inhibition and gene targeting.

### 5.0 BRIEF DESCRIPTION OF THE FIGURES

[0014] FIG. 1A, FIG. 1B, FIG. 1C, and FIG. 1D. Illustration of a gene trap vector and methodology. FIG. 1A. Illustration of a retroviral vector that can be used to practice the described invention. FIG. 1B. Schematic of how a typical cellular genomic locus is effected by the integration of a retroviral construct into intron sequences of a cellular gene. FIG. 1C. Chimeric transcripts produced by the gene trap event, as well as locations of the binding sites for PCR primers. FIG. 1D. Schematic showing how PCR amplified cDNAs are directionally cloned into a suitable GTS vector.

[0015] FIG. 2. Block diagram that is exemplary of a computer system that can be used to implement the computer-based methods of the present invention.

### 6.0 Detailed Description of the Invention

[0016] The present invention is directed to novel human polynucleotide sequences obtained from cDNA libraries generated by the normalized expression of genomic exons using gene trap technology. In particular, the disclosed novel polynucleotides were generated using a modified reverse-orientation retroviral gene trap vector that was integrated nonspecifically into the target cell genome, although other polynucleotide (DNA or RNA) gene trap vectors could have been introduced to the target cells by, for example, transfection, electroporation, or retrotransposition. Retroviral vectors that can be used to practice the invention (as well as methods and recombinant tools for making and using the described GTSs) are disclosed in, inter alia, U.S. Pat. No. 6,436,707.

[0017] After integration, the exogenous promoter of the sequence acquisition, or 3′ gene trap, component of the vector was used to express and splice a chimeric mRNA that was subsequently reverse transcribed, amplified, and subject to DNA sequence analysis. Unlike conventional cDNA libraries, the presently disclosed libraries are largely unaffected by the bias inherent in cDNA libraries that rely solely on endogenous mRNA expression. Additionally, by integrating a vector into the target cell genes, a chimeric mRNA is produced that allows for the specific expansion and isolation of cDNAs corresponding to the chimeric mRNAs using vector specific primers.

[0018] As used herein, the term “gene trapped sequence” (“GTS”), refers to nucleotide sequences that correspond to naturally occurring endogenously encoded human exons that have been expressed as part of a chimeric “gene trapped” mRNA. The chimeric mRNA typically incorporates at least a portion of the sequence that is engineered into the sequence acquisition exon of a gene trap vector that, inter alia, facilitates cDNA production by reverse transcriptase and amplification of the cDNA by PCR to produce an isolated linear DNA molecule. The disclosed GTSs do not include vector encoded sequences.

[0019] The term “GTS” not only refers to polynucleotides that are exactly complementary to naturally occurring human mRNA, but also refers to “GTS derivatives”. The term GTS derivative refers to heterologs, paralogs, orthologs, and allelic variants of the specific GTSs described herein. A GTS may include the complete coding region for a naturally occurring peptide or polypeptide, or a complete open reading frame.

[0020] The term “GTS peptide”, as used herein, includes oligo- or polypeptides sharing biological activity and/or immunogenicity (or immunological cross-reactivity) with an amino acid sequence encoded by at least one of the disclosed GTSs, or the complement thereof. The terms “biological activity” (or “biological characteristics”) of a polypeptide refers to the structural or biochemical function of the polypeptide in the normal biological processes of the organism in which the polypeptide naturally occurs. Examples of such characteristics include protein structure and/or conformation, which can be determined biochemically with appropriate ligands or receptors, or by suitable biological assays.

[0021] A GTS peptide may also correspond to a full-length naturally occurring peptide or polypeptide. GTS peptides can have amino acid sequences that directly correspond to naturally occurring polypeptides or amino acid sequences, or can comprise minor variations. Such variations can include amino acid substitutions that are the result of the replacement of one amino acid with another amino acid having similar structural and/or chemical properties, such as the substitution of a leucine with an isoleucine or valine, an aspartate with a glutamate, or a threonine with a serine, i.e., conservative amino acid replacements. Additional variations include minor amino acid deletions and/or insertions, typically in the range of about 1 to 6 amino acids, and can also include one or more amino acid substitutions. Guidance in determining which GTS peptide amino acid residues can be replaced or deleted without abolishing the biological activity of interest may be determined empirically, or by using computer amino acid sequence databases to identify polypeptides that are homologous to a given GTS peptide, and trying to avoid amino acid substitutions in conserved regions of homology.

[0022] “Homology” refers to the similarity or the degree of similarity between a reference, or known, polynucleotide and/or polypeptide and a test nucleotide sequence and/or its corresponding amino acid sequence. As used herein, “homology” is defined by sequence similarity between a reference sequence and at least a portion of the newly sequenced nucleotide. Usually, a corresponding amino acid sequence similarity exists between the peptides encoded by such homologous sequences.

[0023] To determine whether proteins are homologous, the GTS sequence is translated into the corresponding amino acid sequence. The amino acid sequence is then compared with reference polypeptide sequences. A short string of matching amino acid sequence can constitute good evidence of homology (for example, repeating Gly-Pro-X sequence, or the presence of an RGD motif). However, typically a larger number of similar amino acids is required to label two sequences homologous. Generally, the match needs to be at least about 7 or 8 amino acids, among which perhaps one mismatch is allowed. These criteria allow good sensitivity in finding all relevant sequences while providing a threshold amount of selectivity.

[0024] After peptide homology has been found, the respective nucleotide sequences are compared. An alignment of the reference and new sequences should show at least about 60%, and preferably at least about 65%, agreement over the minimum of 21 nucleotides that correspond to the 6 matching amino acids. Generally, a low percentage of agreement is acceptable if the differences are in the “wobble” position (or third nucleotide of the triplet coding for an amino acid).

[0025] As used herein, a “mutated” polypeptide has an altered primary structure typically resulting from corresponding mutations in the nucleotide sequence encoding the protein or polypeptide. As such, the term “mutated” polypeptides can include allelic variants. Mutational changes in the primary structure of a polypeptide generally result from deletions, additions or substitutions. A “deletion” is defined as a change in a polypeptide sequence in which one or more internal amino acid residues are absent. An “addition” is defined as a change in a polypeptide sequence in which one or more internal amino acid residues have been added compared to the wild-type. A “substitution” results from replacement of one or more amino acid residues by other residues. A polypeptide “fragment” is a polypeptide consisting of a primary amino acid sequence that is identical to a portion of the primary sequence of the polypeptide to which the polypeptide is related.

[0026] A host cell “expresses” a gene or DNA when the gene or DNA is transcribed into RNA that may optionally be translated to produce a polypeptide.

[0027] “Recombinant” means the GTS is adjacent to “backbone” nucleic acids to which it is not adjacent in its natural environment. To be “enriched”, the GTS's will represent 5% or more of the number of nucleic acid inserts in a population of expression vectors, self-replicating nucleic acids, viruses, integrating nucleic acids, and other vectors or nucleic acids used to maintain or manipulate a GTS. Preferably, the enriched GTS represent 15% or more of the number of nucleic acid inserts in the population of recombinant backbone molecules. In a highly preferred embodiment, the enriched GTSs represent 90% or more of the number of nucleic acid inserts in the population of recombinant molecules. Additional definitions exemplary of the general level of skill in the art can be found in U.S. Pat. No. 6,528,289.

[0028] The subject invention also includes GTSs that are incorporated into expression vectors and transformed into host cells, which in certain embodiments subsequently express the polynucleotides and/or polypeptides encoded by the GTSs.

[0029] The subject invention also includes antibodies capable of selectively binding to GTS peptides, as well as methods of detecting a GTS peptide or the corresponding protein by combining a sample for analysis with an antibody capable of selectively binding to a GTS peptide, and detecting the formation of antibody complexes present in the sample.

[0030] The subject invention also includes a method of isolating a GTS peptide, or its corresponding protein, comprising the step of separating the GTS peptide or protein from a solution utilizing an antibody capable of selectively binding to the GTS peptide or its corresponding protein.

[0031] The subject invention also provides for markers for use in detecting diseases, biological events, cell-types, and tissues, which comprise at least a portion of a GTS sequence.

[0032] Further, the subject invention provides polynucleotide markers useful for physical and genetic mapping of the human, and/or certain model organism, genome(s). In particular, the nucleotide sequences in the Sequence Listing provide sequence tagged sites (STS) that will be useful in completing an STS-based physical map of the human genome, which is a goal of the human genome project (Collins and Galas, Science 262:43-46, 1993). Additionally, some of these sequences will identify new genes. These new genes will be useful in completing physical and genetic maps of all the genes in the human genome, another goal of the human genome project.

[0033] The exons contained in the disclosed GTSs contain open reading frames (present in one of the three reading frames in either orientation of the sequence). Typically, the gene trap strategy employed to generate the GTS sequences allows for the directional cloning and identification of the sense strand. However, it is possible that occasional sequencing errors, or random reverse transcription or PCR aberrations, will mask the presence of the appropriate open reading frame (ORF). In such cases, it is possible to determine the corresponding GTS sequence by expressing the GTS in an appropriate expression system and determining the amino acid sequence by standard peptide mapping and sequencing techniques (see, e.g., “Current Protocols in Molecular Biology”, Vol. 2, Ch. 16 (Ausubel et al., eds., Green Publishing Associates, Inc., and John Wiley & Sons, Inc., New York, 1989)). Additionally, the actual reading frame and amino acid sequence of a given nucleotide sequence may be determined by in vitro synthesis of a portion of an oligopeptide comprising a possible amino acid sequence, and preparing antibodies to the oligopeptide. If the antibodies react with cells from which the GTS of interest was derived, the reading frame is likely correct. Alternatively, codon usage analysis can be used to track and correct reading frame shifts in gene sequence data.

[0034] The correct amino acid sequence of a GTS protein is largely a function of the DNA sequence, and the correct amino acid sequence can be readily determined using routine techniques. For example, by providing independent three fold sequencing coverage of the GTS library, random sequencing, reverse transcriptase (RT), or PCR errors can be identified and corrected by selecting the sequence represented by the majority of gene trap sequences covering a given nucleotide.

[0035] The nucleotide sequences of the Sequence Listing may contain some sequencing errors, and several may contain nucleotides that have not been precisely identified, typically designated by an N, rather than A, T, C, or G. Since each of the nucleotide sequences in the Sequence Listing is believed to uniquely identify a novel GTS, any sequencing errors or N's do not present a problem in practicing the subject invention. Several methods employing standard recombinant methodology, for example, as described in “Molecular Cloning, A Laboratory Manual” (Sambrook et al., eds., Cold Spring Harbor Press, Cold Spring Harbor, N.Y., 1989), and periodic updates thereof, may be used to correct errors and complete the missing sequence information. For example, a nucleotide and/or oligonucleotide corresponding to a portion of a nucleotide sequence of a GTS of interest can be chemically or biochemically synthesized in vitro, and used as a-hybridization probe to screen a cDNA library to identify and obtain library isolates comprising recombinant DNA sequences containing the corresponding GTS cDNA sequence. The library isolate can be subjected to nucleotide sequencing, using standard sequencing procedures, to obtain a complete and accurate nucleotide sequence.

[0036] For the purposes of this disclosure, the term “isolated” or “purified” polynucleotide comprises a polynucleotide purified from a natural cell or tissue, as well as polynucleotides that are complementary to the polynucleotides isolated from the natural cell or tissue. One example of an isolated or purified polynucleotide, or a substantially isolated preparation thereof, is a preparation in which the polynucleotide of interest represents at least about 80 percent, at least about 85 percent, or at least about 90 to 95 percent or more, of the net product(s) that can be visualized on a DNA agarose gel stained with ethidium bromide.

[0037] The described GTSs were obtained from isolates of a cDNA library. Clones isolated from cDNA libraries generated by 3′ gene trapping typically contain only a portion of the mature RNA transcript that has been spliced to a vector-encoded sequence acquisition exon, and therefore such clones may only encode a portion of the polypeptide of interest (however, it should be appreciated that a number of the disclosed GTSs may encode full-length ORFs). To obtain the remainder of the sequence, the GTSs can be used as hybridization probes to screen the same or a different cDNA library, and additional clones identified can be purified and characterized using standard methods (Benton and Davis, Science 196:180-182, 1977). Once sufficiently purified, the size of the DNA insert can be approximated by agarose gel electrophoresis, and the larger clones can be analyzed to determine the exact number of bases by DNA sequencing. Frequently, the use of a library different from the one that contained the original clone is useful for this purpose, for example a library that has been prepared with extra care to extend cDNA synthesis to full-length, or a library that has been intentionally primed with random primers in order to “jump over” particularly difficult regions of the transcript sequence.

[0038] Missing upstream DNA sequence can also be obtained by “primer extension” of the cDNA isolate, a practice common in the art (“Molecular Cloning: Laboratory Manual”, supra, Vol. 2 at pg. 7.79-7.83), whereby a sequence-specific oligonucleotide is used to prime reverse-transcription near the 5′-end of the cDNA clone, and the resulting product is either cloned into a bacterial vector or is analyzed directly by DNA sequencing. Additionally, newer methods to extend clones in either direction employ oligonucleotide-directed thermocyclic DNA amplification of the missing sequences, wherein a combination of a cDNA-specific primer and a degenerate vector-specific, or oligo-dT-binding, second oligonucleotide are used to prime strand synthesis. In any of the above methods, or other methods of detecting additional cDNA sequence, two or more resulting clones containing the partial cDNA sequence can be recombined to form a single full-length cDNA by standard cloning methods. The resulting full-length cDNA may subsequently be transferred into any of a number of appropriate expression vectors, as described herein.

[0039] In many instances, the sequencing of clones resulting from independent nonspecific gene trap events will result in a natural redundancy (sequencing more than one cDNA from a particular gene). As discussed above, this feature is a built-in form of error detection and correction. These independent gene trap events can also be combined using any overlapping regions of sequence into a larger contiguous sequence (“contig”), that may contain the complete nucleotide sequence of the full length cDNA. Similar methodology can be used to combine one or more GTSs with one or more publicly available and/or proprietary ESTs to synthesize, electronically or chemically, a contiguous sequence.

[0040] The ABI Assembler application, part of the INHERITS DNA analysis system (Applied Biosystems, Inc., Foster City, Calif.), creates and manages sequence assembly projects by assembling data from selected sequence fragments into a larger sequence. The Assembler combines two advanced computer technologies that maximize the ability to assemble sequenced DNA fragments into Assemblages, a special grouping of data where relationships between sequences are shown by graphic overlap, alignment, and statistical views. The process is based on the Meyers-Kececioglu model of fragment assembly (INHERITS™ Assembler User's Manual; Applied Biosystems), and uses graph theory as the foundation of a very rigorous multiple sequence alignment program for assembling DNA sequence fragments. Additional methods of analyzing and using partial length sequences, such as most GTSs, and obtaining full-length versions thereof, are discussed in U.S. Pat. Nos. 5,817,479 and 5,552,281, and U.S. patent application Ser. No. 08/904,468.

[0041] It will be appreciated by those skilled in the art that as a result of the degeneracy of the genetic code (see, e.g., “Molecular Cell Biology”, Table 4-1 at page 109 (Darnell et al., eds., Scientific American Books, New York, N.Y., 1986)), a multitude of GTS nucleotide sequences, some bearing minimal nucleotide sequence homology to the nucleotide sequence of genes naturally encoding GTS peptides, can be produced. The invention has specifically contemplated each and every possible variation of nucleotide sequence that could be made by selecting combinations based on possible codon choices. These combinations are made in accordance with the standard triplet genetic code as applied to the nucleotide sequence of naturally occurring human GTS nucleotide sequences, and all such variations are to be considered as being specifically disclosed. Once the triplet codons are “translated” (which can be done electronically) into their amino acid counterparts, the amino acid sequences encoded by the GTS ORFs effectively constitute a generic representation of the various nucleotide sequences that can encode the amino acid sequence (i.e., each amino acid is generic for the various nucleotide codons that correspond to that amino acid).

[0042] The presently described novel human GTSs provide unique tools for diagnostic gene expression analysis, for cross-species hybridization analysis, and for genetic manipulations using a variety of techniques (including, but not limited to, antisense inhibition, gene targeting, identification or generation of full-length cDNA, mapping the human genome, gene therapy, and/or gene delivery). Furthermore, the expression-based detection and isolation of the described novel polynucleotides verifies that the genes encoding these sequences have not been inactivated by, for example, the covalent modification (methylation, acetylation, glycosylation, etc.) of the target cell genome, or inhibiting the function of transcriptional control elements. The fact that the genes have not been inactivated in the target cell genome can indicate an involvement in cellular metabolism, catabolism, homeostasis, or any of a wide variety of developmental and cell differentiation processes or the regulation of physiological or endocrine functions in the body (although treating the target cell with, for example, histone deacetylators can partially compensate for such inactivation and expand the target size of a given trapping construct). These data are especially useful when correlated with cDNA data from differentiated tissues, cells, and/or cell lines, in order to determine whether the absence of expression is regulated at the level of transcription or gene inactivation.

### 6.1 Polynucleotides of the Present Invention

[0043] The nucleotide sequences of the various isolated human GTSs of the present invention appear in the Sequence Listing as SEQ ID NOS:10-5,504. Additional embodiments of the present invention are GTS variants, or homologs, paralogs, orthologs, etc., which include isolated polynucleotides, or complements thereof, that hybridize to one or more of the disclosed GTSs of SEQ ID NOS:10-5,504 under stringent, or preferably highly stringent, conditions. By way of example and not limitation, high stringency hybridization conditions can be defined as follows. Prehybridization of filters containing DNA to be screened is carried out from 8 hours to overnight at 65° C. in a buffer containing 6×SSC, 50 mM Tris-HCl (pH 7.5), 1 mM EDTA, 0.02% PVP, 0.02% Ficoll, 0.02% BSA, and 500 μg/ml denatured salmon sperm DNA. Filters are hybridized for 48 hours at 65° C. in prehybridization mixture containing 100 μg/ml denatured salmon sperm DNA and 5-20×10⁶ cpm of ³²P-labeled probe (alternatively, as in all hybridizations described herein, approximately 42, 44, 46, 48, 50, 52, 54, 56, 58, 62, 64, 66, 68, 70, or about 72 degrees or more can be used, with a suitable concentration of salt). The filters are then washed in approximately 1× wash mix (10× wash mix contains 3 M NaCl, 0.6 M Tris base, and 0.02 M EDTA, alternatively, as with all washes described herein, 2×, 3×, 4×, 5×, 6× wash mix, or more, can be used) twice for 5 minutes each at room temperature, then in 1× wash mix containing 1% SDS at 60° C. (alternatively, as in all washes described herein, approximately 42, 44, 46, 48, 50, 52, 54, 56, 58, 62, 64, 66, 68, 70, or about 72 degrees or more can be used) for about 30 minutes, and finally in 0.3× wash mix (alternatively, as in all final washes described herein, approximately, 0.2×, 0.4×, 0.6×, 0.8×, 1×, or any concentration between about 2× and about 6× can be used in conjunction with a suitable wash temperature) containing 0.1% SDS at 60° C. (alternatively, as in all final washes described herein, approximately 42, 44, 46, 48, 50, 52, 54, 56, 58, 62, 64, 66, 68, 70, or about 72 degrees or more can be used) for about 30 minutes. The filters are then air dried and exposed to x-ray film for autoradiography. In an alternative protocol, washing of filters is done at 37° C. for 1 hour in a solution containing 2×SSC, 0.01% PVP, 0.01% Ficoll, and 0.01% BSA. This is followed by a wash in 0.1×SSC at 50° C. for 45 minutes before autoradiography. Another example of hybridization under highly stringent conditions is hybridization to filter-bound DNA in 0.5 M NaHPO₄, 7% sodium dodecyl sulfate (SDS), 1 mM EDTA at 65° C., and washing in 0.1×SSC/0.1% SDS at 68° C. (see, e.g., “Current Protocols in Molecular Biology”, supra, at p. 2.10.3).

[0044] Preferably, such GTS variants will encode at least a portion or domain of a, preferably naturally occurring, protein or polypeptide that encodes a functional equivalent to a protein or polypeptide, or portion or domain thereof, encoded by the disclosed GTSs. Additional examples of GTS variants include polynucleotides, or complements thereof, that are capable of binding to the disclosed GTSs under less stringent conditions, such as moderately stringent conditions, (e.g., washing in 0.2×SSC/0.1% SDS at 42° C. (see, e.g., “Current Protocols in Molecular Biology”, supra)). Moderately stringent conditions can be additionally defined, for example, as follows. Filters containing DNA are pretreated for 6 hours at 55° C. in a solution containing 6×SSC, 5× Denhart's solution, 0.5% SDS and 100 μg/ml denatured salmon sperm DNA. Hybridizations are carried out in the same solution, and 5-20×10⁶ cpm ³²P-labeled probe is used. Filters are incubated in hybridization mixture for 18-20 hours at 55° C. The filters are then washed in approximately 1× wash mix twice for 5 minutes each at room temperature, then in 1× wash mix containing 1% SDS at 60° C. for about 30 minutes, and finally in 0.3× wash mix containing 0.1% SDS at 60° C. for about 30 minutes. The filters are then air dried and exposed to x-ray film for autoradiography. In an alternative protocol, washing of filters is done twice for 30 minutes at 60° C. in a solution containing 1×SSC and 0.1% SDS. Filters are blotted dry and exposed for autoradiography.

[0045] Other conditions of moderate stringency that may be used are well-known in the art. For example, washing of filters can be done at 37° C. for 1 hour in a solution containing 2×SSC and 0.1% SDS. Such less stringent conditions may also be, for example, low stringency hybridization conditions (e.g., as employed for cross-species hybridizations; see, e.g., Shilo and Weinberg, Proc. Natl. Acad. Sci. USA 78:6789-6792, 1981). By way of example, and not limitation, a procedure using low stringency conditions is as follows. Filters containing DNA are pretreated for 6 hours at 40° C. in a solution containing 35% formamide, 5×SSC, 50 mM Tris-HCl (pH 7.5), 5 mM EDTA, 0.1% PVP, 0.1% Ficoll, 1% BSA, and 500 μg/ml denatured salmon sperm DNA. Hybridization is carried out in a solution containing 35% formamide, 5×SSC, 50 mM Tris-HCl (pH 7.5), 5 mM EDTA, 0.02% PVP, 0.02% Ficoll, 0.2% BSA, 100 μg/ml salmon sperm DNA, 10% (wt/vol) dextran sulfate, and 5-20×10⁶ cpm of ³²P-labeled probe is used. Filters are incubated in hybridization mixture for 18-20 hours at 40° C. The filters are then washed in approximately 1× wash mix twice for five minutes each at room temperature, then in 1× wash mix containing 1% SDS at 60° C. for about 30 minutes, and finally in 0.3× wash mix containing 0.1% SDS at 60° C. for about 30 minutes. The filters are then air dried and exposed to x-ray film for autoradiography. In an alternative protocol, washing of filters is done for 1.5 hours at 55° C. in a solution containing 2×SSC, 25 mM Tris-HCl (pH 7.4), 5 mM EDTA, and 0.1% SDS. The wash solution is replaced with fresh solution, and incubated an additional 1.5 hours at 60° C. Filters are then blotted dry and exposed for autoradiography. If necessary, filters can be washed for a third time at 65-68° C., and re-exposed to film. Preferably, GTS variants identified or isolated using any of the above methods will encode a functionally equivalent gene product (i.e., a protein, polypeptide, or domain thereof, associated with at least one of the functions and/or structures encoded by the complementary GTS, or a fragment thereof).

[0046] Additionally contemplated are gene products, or their functional equivalent, encoded by a polynucleotide sequence that is at least about 99, 95, 90, or about 85 percent similar or identical to a GTS described in the Sequence Listing, or a fragment thereof (as measured by BLAST sequence comparison analysis using, for example, the University of Wisconsin GCG sequence analysis-package (SEQUENCHER 3.0, Gene Codes Corp., Ann Arbor, Mich.) using standard default parameters).

[0047] Additional embodiments contemplated by the present invention include any polynucleotide sequence comprising a continuous stretch of nucleotide sequence of at least 8, at least 10, at least 14, at least 20, at least 30, at least 40, or at least 60 consecutive nucleotides originally disclosed in, or otherwise unique to, any of the GTSs of SEQ ID NOS:10-5,504, up to a contiguous stretch of about several hundred bases, or an entire GTS sequence. Functional equivalents of the gene products of SEQ ID NOS:10-5,504 include naturally occurring variants of SEQ ID NOS:10-5,504 present in other species, and mutant variants, both naturally occurring and engineered, that retain at least one functional activity of the gene products of SEQ ID NOS:10-5,504.

[0048] The present invention also contemplates nucleic acid sequences comprising at least 8, 9, 10, 11, 12, 13, 14, 15, 16, 17, 18, 19, 20, 21, 22, 23, 24, 25, 26, 27, 28, 29, 30, 31, 32, 33, 34, 35, 36, 37, 38, 39, 40, 41, 42, 43, 44, 45, 46, 47, 48, 49, 50, 51, 52, 53, 54, 55, 56, 57, 58, 59, 60, 61, 62, 63, 64, 65, 66, 67, 68, 69, 70, 71, 72, 73, 74, 75, 76, 77, 78, 79, 80, 81, 82, 83, 84, 85, 86, 87, 88, 89, 90, 91, 92, 93, 94, 95, 96, 97, 98, 99, 100, 125, 150, 175, 200, 250, 300, or 350 or more contiguous nucleotides from any of the disclosed GTS sequences. Additionally, the invention contemplates nucleic acid sequences comprising polynucleotides encoding at least 3, 4, 5, 6, 7, 8, 9, 10, 11, 12, 13, 14, 15, 16, 17, 18, 19, 20, 21, 22, 23, 24, 25, 26, 27, 28, 29, 30, 31, 32, 33, 34, 35, 40, 50, 60, 70, 80, 90, or 100 or more contiguous amino acids encoded by any of the described GTSs.

[0049] The invention also includes degenerate variants of the disclosed GTS sequences, and products encoded thereby. The invention further includes GTS derivatives wherein a GTS sequence, or variant thereof, is operably linked to another polynucleotide molecule. The linkage may be direct, or through another polynucleotide of any sequence and of a length of about 1,000 base pairs, about 500 base pairs, about 300 base pairs, about 200 base pairs, about 150 base pairs, about 100 base pairs, or about 50 base pairs, or less.

[0050] The invention also includes polynucleotide molecules, including DNA, that hybridize to, and are therefore the complements of, the disclosed GTS nucleotide sequences. Such hybridization conditions may be highly stringent or less highly stringent, as described herein. Where the nucleic acid molecules are deoxyoligonucleotides (“DNA oligos”), highly stringent conditions may refer to, for example, washing in 6×SSC/0.05% sodium pyrophosphate at 37° C. (for 14-base DNA oligos), 48° C. (for 17-base DNA oligos), 55° C. (for 20-base DNA oligos), or 60° C. (for 23-base DNA oligos). Similar conditions are contemplated for RNA oligos corresponding to a portion of any of the disclosed GTS sequences.

[0051] These nucleic acid molecules may encode or act as antisense molecules to polynucleotides comprising at least a portion of any of the sequences shown in SEQ ID NOS:10-5,504. Such molecules are useful, for example, to regulate the expression of genes comprising a nucleotide sequence of any of SEQ ID NOS:10-5,504, and can also be used, for example, as antisense primers in amplification reactions of gene sequences. With respect to gene regulation, such techniques can be used to regulate, for example, developmental processes by modulating the expression of genes in embryonic stem cells. Further, such sequences may be used as part of ribozyme and/or triple helix sequences that can be used to regulate gene expression. Still further, such molecules may be used as components of diagnostic methods whereby, for example, the presence of a particular allele of a gene that contains any of the sequences of SEQ ID NOS:10-5,504 may be detected. Of particular interest is the use of the disclosed GTSs to conduct analysis of single nucleotide polymorphisms (SNPs), and particularly coding region SNPs or “cSNPs”, in the human genome, or as general or individual-specific forensic markers. When so applied, a collection of GTSs is obtained from an individual, and screened against a control database of cSNPs (or other genetic markers) that have previously been associated with disease, suitability or susceptibility (or sensitivity) to specific drugs or therapies, or virtually any other human trait that correlates with a given cSNP or genetic marker, or assortment thereof. Additionally, the described GTSs are useful as genetic markers for the prenatal analysis of congenital traits or defects.

[0052] In addition to the nucleotide sequences described herein, full-length cDNA or gene sequences that contain any of SEQ ID NOS:10-5,504, present in humans and/or homologs of any of those genes present in other species, can be identified and isolated using standard molecular biological techniques. For example, oligonucleotides corresponding to either the 5′ or 3′ terminus of the cDNA sequence may be used to obtain longer nucleotide sequences. In order to clone a full-length cDNA sequence, or a variant or homolog, from any species, labeled DNA probes made from nucleic acid fragments corresponding to any portion of the cDNA sequences disclosed herein may be used to screen a cDNA library. For example, a cDNA library can be plated out to yield a maximum of about 30,000 pfu for each 150 mm plate, and approximately 40 plates may be screened. The plates are incubated at 37° C. until the plaques reach a diameter of about 0.25 mm, or are just beginning to make contact with one another (3-8 hours). Nylon filters are placed onto the soft top agarose, and after 60 seconds, the filters are peeled off and floated on a DNA denaturing solution (0.4 N sodium hydroxide) for 1-5 minutes. Next, the filters are immersed in neutralizing solution (1 M Tris-HCl, pH 7.5), before being allowed to air dry. The filters are prehybridized in casein hybridization buffer (10% dextran sulfate, 0.5 M NaCl, 50 mM Tris-HCl, pH 7.5, 0.1% sodium pyrophosphate, 1% casein, 1% SDS, 0.5 mg/ml denatured salmon sperm DNA) for 6 hours at 60° C. The labeled probe is then denatured by heating to 95° C. for 2 minutes, and then added to the prehybridization solution containing the filters. The filters are hybridized at 60° C. for about 16 hours. The filters are then washed in approximately 1× wash mix twice for 5 minutes each at room temperature, then in 1× wash mix containing 1% SDS at 60° C. for about 30 minutes, and finally in 0.3× wash mix containing 0.1% SDS at 60° C. for about 30 minutes. The filters are then air dried and exposed to x-ray film for autoradiography. After developing, the film is aligned with the filters to select positive plaques. If a single, isolated positive plaque cannot be obtained, an agar plug surrounding the plaque is removed and placed in lambda dilution buffer (0.1 M NaCl, 0.01 M magnesium sulfate, 0.035 M Tris-HCl, pH 7.5, 0.01% gelatin), and again plated and screened to obtain single, well isolated positive plaques. Positive plaques are isolated, and the cDNA clones sequenced using primers based on the known cDNA sequence. This step may be repeated until a full-length cDNA is obtained.

[0053] It may be necessary to screen multiple cDNA libraries from different sources/tissues to obtain a full-length cDNA. In the event that it is difficult to identify cDNA clones encoding the complete 5′ terminal coding region, a common situation in cDNA cloning, the RACE (Rapid Amplification of cDNA Ends) technique may be used. RACE is a proven PCR-based strategy for amplifying the 5′ end of incomplete cDNAs. 5′-RACE-Ready cDNA synthesized from human fetal liver containing a unique anchor sequence is commercially available (Clontech, Palo Alto, Calif.). To obtain the 5′ end of the cDNA, PCR is carried out, for example, on 5′-RACE-Ready cDNA using the provided anchor primer and the 3′ primer. A secondary PCR reaction is then carried out using the anchored primer and a nested 3′ primer according to the manufacturer's instructions. Once obtained, the full-length cDNA sequence may be translated into amino acid sequence, and examined for certain landmarks found in, or any structural similarities to, the amino acid sequences encoded by SEQ ID NOS:10-5,504.

[0054] The identification of homologs, heterologs, or paralogs of SEQ ID NOS:10-5,504 in other, preferably related, species can be useful for developing additional animal model systems that are closely related to humans for purposes of drug discovery. Genes at other genetic loci within the genome that encode proteins that have extensive homology to one or more domains of the gene products encoded by SEQ ID NOS:10-5,504, as well as clones derived from alternatively spliced transcripts in the same or different species, can be identified, for example, by screening cDNA libraries using filter hybridization with duplicate filters and a labeled probe. The labeled probe can, in certain embodiments, contain at least 15-30 contiguous nucleotides from the nucleotide sequence presented in any of SEQ ID NOS:10-5,504. The hybridization and washing conditions should be of a lower stringency when the cDNA library is derived from a different, or heterologous, organism. With respect to the cloning of a mammalian homolog, heterolog, ortholog, or paralog, using a probe derived from any of the disclosed cDNA sequences, hybridization can, for example, be performed at 65° C. overnight in Church's buffer (7% SDS, 250 mM NaHPO₄, 2 mM EDTA, 1% BSA). Washes can be done with 2×SSC and 0.1% SDS at 65° C., and then with 0.1×SSC and 0.1% SDS at 65° C. Additional low stringency conditions are well-known to those of skill in the art (see, e.g., “Molecular Cloning, A Laboratory Manual”, supra, and “Current Protocols in Molecular Biology”, supra), and will vary predictably depending on the specific organism from which the cDNA library is derived.

[0055] Alternatively, a labeled nucleotide probe corresponding to any of SEQ ID NOS:10-5,504 may be used to screen a genomic library derived from an organism of interest, again, using appropriately stringent conditions. The identification and characterization of human genomic clones is helpful for designing diagnostic tests and clinical protocols for treating disorders, for example in human patients that are known to have or suspected of having a developmental or cell differentiation disorder or abnormality. For example, sequences derived from regions adjacent to the intron/exon boundaries of the human gene can be used to design primers for use in diagnostic amplification assays to detect mutations within the exons, introns, and/or splice sites (e.g., splice acceptor and/or donor sites).

[0056] Alternatively, homologs can be isolated from nucleic acid of an organism of interest by performing PCR using two oligonucleotide primers derived from SEQ ID NOS:10-5,504, or two degenerate oligonucleotide primer pools designed on the basis of amino acid sequences within the gene products encoded by SEQ ID NOS:10-5,504. The template for the reaction may be cDNA obtained by reverse transcription of mRNA prepared from, for example, human or non-human cell lines, cell-types, or tissues from the organism of interest, including, but not limited to, ES cells. The PCR product may be sequenced directly, or subcloned and sequenced, to ensure that the amplified sequence represents sequence from the gene of interest, corresponding any one of SEQ ID NOS:10-5,504. The PCR fragment may then be used to isolate a full-length cDNA clone, using any of a number of standard methods. For example, the amplified fragment may be labeled and used to screen a cDNA library, such as a bacteriophage cDNA library. Alternatively, the labeled fragment may be used to isolate genomic clones via the screening of a genomic library.

[0057] PCR can also be utilized to isolate full-length cDNA sequences, using any standard cloning strategy (see, e.g., “Molecular Cloning, A Laboratory Manual”, supra). For example, RNA may be isolated, using any standard procedure, from an appropriate cellular source (i.e., one known to express, or suspected of expressing, the gene of interest corresponding to any of SEQ ID NOS:10-5,504), such as ES cells. A RT reaction can be performed on the RNA using an oligonucleotide primer specific for a sequence near the 5′ end of any of SEQ ID NOS:10-5,504, for the priming of first strand synthesis. The resulting RNA/DNA hybrid can be “tailed” with guanines, for example, using a standard terminal transferase reaction, digested with RNase H, and second strand synthesis primed with a poly-C primer. Thus, cDNA sequences upstream from any of SEQ ID NOS:10-5,504 can easily be isolated. Alternatively, a cDNA or genomic library can be screened using 5′ PCR primer that hybridizes to vector sequence, and a 3′ PCR primer corresponding to any of SEQ ID NOS:10-5,504.

[0058] The sequence of a gene corresponding to any of the sequences of SEQ ID NOS:10-5,504 can also be used to isolate mutant alleles of that gene. Such mutant alleles may be isolated from an individual either known to have or suspected of having a genotype that contributes to a developmental and/or cell differentiation or proliferation disorder or abnormality, or any other particular disease of interest. Mutant alleles and mutant allele products may then be utilized in the therapeutic and diagnostic programs described herein.

[0059] A mutant allele corresponding to any of SEQ ID NOS:10-5,504 can be isolated from a genomic library made using DNA obtained from one or more individuals suspected of carrying, or known to carry, the mutant gene. The corresponding normal gene, or any suitable fragment thereof, can be labeled and used as a probe to identify the corresponding mutant gene in such a library. Clones containing the mutant gene sequences may then be identified and analyzed by DNA sequence analysis. By comparing the DNA sequence of the mutant gene to that of the normal gene, the mutation(s) responsible for the loss or alteration of function of the mutant gene product can be ascertained. Additionally, such sequences can be used to detect gene regulatory (e.g., promoter or promoter/enhancer) defects, which can affect development and/or cell differentiation.

[0060] Additionally, a cDNA of a mutant gene corresponding to any of the sequences of SEQ ID NOS:10-5,504 can be isolated as discussed above, or, for example, by using PCR. In this method, the first cDNA strand may be synthesized by hybridizing an oligo-dT oligonucleotide to mRNA isolated from cells derived from an individual known to carry, or suspected of carrying, the mutant gene, and extending the new strand with reverse transcriptase. The second strand of the cDNA is then synthesized using an oligonucleotide that hybridizes specifically to the 5′ region of the normal gene. The amplified product can be sequenced directly, or cloned into a suitable vector and subsequently sequenced. When compared to the sequence of the normal cDNA, the mutation(s) responsible for the loss or alteration of function of the mutant gene product can be identified.

[0061] Alternatively, mRNA from cell-types known to express, or suspected of expressing, such mutant alleles can be used to construct a mutant cDNA library. The library can be screened using a labeled probe corresponding to the normal gene, or any suitable fragment thereof, to identify the corresponding mutant allele. Clones containing the mutant gene sequences may then be identified and analyzed by DNA sequence analysis. Once again, by comparing the sequence of the mutant allele to the sequence of the normal cDNA, the mutation(s) responsible for the loss or alteration of function of the mutant gene product can be identified.

[0062] Furthermore, mRNA from cell-types known to express, or suspected of expressing, such mutant alleles can be used to construct a protein expression library. In this manner, gene products made by the putatively mutant cell-type may be expressed and screened using standard antibody screening techniques in conjunction with antibodies raised against the corresponding normal gene product, or a portion thereof, as described below in Section 6.4 (for screening techniques, see, e.g., “Antibodies: A Laboratory Manual” (Harlow and Lane, eds., Cold Spring Harbor Press, Cold Spring Harbor, N.Y., 1988)). Screening can also be accomplished using a labeled fusion protein. In cases where a mutation results in an expressed gene product with altered function (e.g., as a result of a missense or frame shift mutation), polyclonal antibodies to the normal gene product are likely to cross-react with the mutant gene product. Library clones detected via their reaction with such labeled antibodies or fusion proteins can be purified and subjected to sequence analysis according to methods well-known to those of skill in the art.

[0063] The invention also encompasses nucleotide sequences that encode mutant isoforms of any of the amino acid sequences encoded by the GTSs of SEQ ID NOS:10-5,504, peptide fragments and truncated versions thereof, and fusion proteins including any of the above. Examples of such fusion proteins include, but are not limited to, an epitope tag that aids in detection or purification of the fusion protein, or fluorescent protein, luminescent protein, or enzyme, that can be used as a marker.

[0064] The present invention also encompasses: (a) RNA or DNA vectors that contain any portion of any one or more of SEQ ID NOS:10-5,504, and/or their complements, as well as any sequence that encodes any of the peptides or proteins encoded thereby; (b) DNA vectors that contain a cDNA that spans substantially the entire ORF corresponding to any of SEQ ID NOS:10-5,504 and/or their complements; (c) DNA expression vectors comprising any of the foregoing sequences, or portion thereof, operatively associated with a regulatory element that directs the expression of the coding sequences in a host cell; and (d) genetically engineered host cells that contain a cDNA that encodes the entire coding sequence, or portion thereof, corresponding to any of the sequences of SEQ ID NOS:10-5,504, operatively associated with a regulatory element that directs the expression of the coding sequence in the host cell.

[0065] Such regulatory elements are generally recombinantly positioned either in vivo (such as in gene activation) or in vitro. As used herein, regulatory elements include, but are not limited to, inducible and non-inducible promoters, enhancers, operators, and other elements known to those skilled in the art that drive and regulate expression. Such regulatory elements include, but are not limited to, the human cytomegalovirus (hCMV) immediate early gene, regulatable viral elements (particularly retroviral LTR promoters), the early or late promoters of SV40 adenovirus, the lac system, the trp system, the TAC system, the TRC system, the major operator and promoter regions of phage lambda, the control regions of fd coat protein, the promoter for 3-phosphoglycerate kinase (PGK), the promoters of acid phosphatase, and the promoters of the yeast alpha-mating factors.

### 6.2 Proteins and Polypeptides Encoded by Polynucleotides Expressed in Modified Human Cells

[0066] The present invention also encompasses peptides and proteins encoded by the open reading frame of any of SEQ ID NOS:10-5,504, polypeptide and peptide fragments, mutated, truncated or deleted forms of those peptides and proteins, and fusion proteins containing any of those peptides and proteins. Such compositions can be prepared for a variety of uses, including, but not limited to, for generation of antibodies, as reagents in diagnostic assays, for identification of other cellular gene products involved in the regulation of development and/or cellular differentiation of various cell-types (for example ES cells), as reagents in screening assays for compounds that can be used in the treatment of disorders affecting development and/or cell differentiation, and as pharmaceutical reagents useful in the treatment of disorders affecting development and/or cell differentiation.

[0067] The invention also encompasses proteins, peptides, and polypeptides that are functionally equivalent to those encoded by SEQ ID NOS:10-5,504. Such functionally equivalent products include, but are not limited to, additions or substitutions of amino acid residues within an amino acid sequence encoded by SEQ ID NOS:10-5,504, but that result in a silent change, thus producing a functionally equivalent gene product. Amino acid substitutions can be made on the basis of similarity in polarity, charge, solubility, hydrophobicity, hydrophilicity, and/or the amphipathic nature of the residues involved. For example, nonpolar (hydrophobic) amino acids include alanine, leucine, isoleucine, valine, proline, phenylalanine, tryptophan, and methionine, polar neutral amino acids include glycine, serine, threonine, cysteine, tyrosine, asparagine, and glutamine, positively charged (basic) amino acids include arginine, lysine, and histidine, and negatively charged (acidic) amino acids include aspartic acid and glutamic acid.

[0068] Random mutations or site-directed mutations can be introduced into DNA encoding the gene products of the current invention, using mutagenesis techniques well-known to the skilled artisan. The resulting gene products can be tested for activity to identify mutant peptides and proteins having similar, or in some cases increased, functionality. For example, the amino acid sequence of the gene products of the current invention can be aligned with the sequence of homologs from one or more different species. Mutant gene products can be engineered so that regions of interspecies identity are maintained, while the variable residues are altered, e.g., by deletion or insertion of one or more amino acid residue(s), or by substitution of one or more different amino acid residues. Conservative alterations at variable positions can generally be engineered in order to produce a mutant gene product that retains function, while non-conservative changes can generally be engineered at these variable positions to produce a mutant peptide or protein having an altered function. Alternatively, where alteration of function is desired, deletion, insertion, or non-conservative alterations in the conserved regions can be engineered. One of skill in the art may readily test such mutant peptides or proteins for any alteration in function using the teachings presented herein.

[0069] Mutations of DNA encoding the instant gene products can also be made to generate peptides and proteins that are better suited for expression, scale up, etc., in the particular host cell chosen for expression. For example, the triplet code for each amino acid can be modified to conform more closely to the preferential codon usage of the translational machinery of the particular host cell (for instance, to yield a messenger RNA molecule with a longer half-life). Those skilled in the art understand what modifications of the nucleotide sequence would conform the nucleotide sequence to preferential codon usage of the particular host cell, and/or to make the messenger RNA more stable. Such information is obtainable, for example, through use of computer programs, review of available research data on codon usage and messenger RNA stability, and other means known to those of skill in the art.

[0070] Additionally, the instant human polynucleotide sequences can be used in the molecular mutagenesis/evolution of proteins that are at least partially encoded by the instant GTSs using, for example, polynucleotide shuffling or related methodologies (see, e.g., U.S. Pat. Nos. 5,830,721 and 5,837,458).

[0071] As described above, the novel GTSs of the present invention encode novel ORFs. Such ORFs can occur in any of the six possible reading frames inherently present in the described GTSs. Such novel sequences can be used as, for example, epitope tags, or for the generation of hybrid/fusion proteins. Accordingly, another aspect of the present invention includes isolated polynucleotides comprising a sequence first disclosed in SEQ ID NOS:10-5,504 that encodes a novel peptide sequence, and the resulting fusion products.

[0072] As detailed above, fusion proteins in which a protein, polypeptide, or peptide of the present invention is fused to an unrelated protein are also within the scope of the invention. Such fusion proteins can be designed by those of skill in the art on the basis of experimental or functional considerations, and include, but are not limited to, fusion to an epitope tag, which can aid isolation, purification, and/or detection, and fusion to an enzyme, fluorescent protein, or luminescent protein, which can provide a marker function.

[0073] While the peptides and proteins of the current invention can be chemically synthesized (see, e.g.,“Proteins: Structures and Molecular Principles” (Creighton, ed., W. H. Freeman & Co., N.Y., 1983)), large polypeptides or proteins derived from any of SEQ ID NOS:10-5,504 may advantageously be produced by techniques well-known in the art for expressing genes and/or coding sequences. These techniques include, but are not limited to, in vitro recombinant DNA techniques, synthetic techniques, and in vivo genetic recombination (see, e.g., the techniques described in “Molecular Cloning, A Laboratory Manual”, supra, and “Current Protocols in Molecular Biology”, supra). Alternatively, DNA and/or RNA encoding any of the proteins, polypeptides, or peptides of the present invention may be chemically synthesized using, for example, synthesizers (see, e.g., the techniques described in “Oligonucleotide Synthesis” (Gait, ed., IRL Press, Oxford, 1984)).

[0074] A variety of host-expression vector systems may be utilized to express the instant nucleotide sequences. Where the gene product to be produced is a soluble derivative, the gene product can be recovered from the culture, i.e., from the host cell if the peptide or protein is not secreted, and from the culture media if the peptide or protein is secreted by the cells. However, such engineered host cells themselves may be used in situations where it is important not only to retain the structural and functional characteristics of the expressed peptide or protein, but to assess biological activity, e.g., in certain drug screening assays.

[0075] The expression systems that may be used in the invention include, but are not limited to: microorganisms such as bacteria (e.g., E. coli, B. subtilis) transformed with a recombinant bacteriophage DNA, plasmid DNA, or cosmid DNA expression vector containing one or more nucleotide sequences from any of SEQ ID NOS:10-5,504; yeast (e.g., Saccharomyces, Pichia) transformed with a recombinant yeast expression vector containing one or more nucleotide sequences from any of SEQ ID NOS:10-5,504; insect cell systems infected with a recombinant virus expression vector (e.g., baculovirus) containing one or more nucleotide sequences from any of SEQ ID NOS:10-5,504; plant cell systems either infected with a recombinant virus expression vector (e.g., cauliflower mosaic virus or tobacco mosaic virus), or transformed with a recombinant plasmid expression vector (e.g., Ti plasmid), containing one or more nucleotide sequences from any of SEQ ID NOS:10-5,504; or mammalian cell systems (e.g., COS, CHO, BHK, 293, 3T3, U937) using a recombinant expression construct comprising one or more nucleotide sequences from any of SEQ ID NOS:10-5,504 and a promoter derived either from the genome of mammalian cells (e.g., metallothionein promoter) or from mammalian viruses (e.g., the adenovirus late or vaccinia virus 7.5K promoter).

[0076] In bacterial systems, any of a number of expression vectors may be advantageously selected depending upon the use intended for the gene product being expressed. When large quantities of the gene product are to be produced, for example for the generation of pharmaceutical compositions comprising the gene product, or for raising antibodies to the gene product, vectors that direct the expression of high levels of fusion protein products that are readily purified may be desirable. Such vectors include, but are not limited to: the E. coli expression vector pUR278 (Ruther and Muller-Hill, EMBO J. 2:1791-1794, 1983), in which the coding sequence of the polynucleotide to be expressed may be ligated individually into the vector in frame with the lacZ coding region so that a fusion protein is produced; pIN vectors (Inouye and Inouye, Nucleic Acids Res. 13:3101-3109, 1985, and Van Heeke and Schuster, J. Biol. Chem. 264:5503-5509, 1989); PGEX vectors; and the like. pGEX vectors can be used to express foreign polypeptides as fusion proteins with glutathione S-transferase (GST). Such fusion proteins are generally soluble, and can easily be purified from lysed cells by adsorption to glutathione-agarose beads, followed by elution in the presence of free glutathione. The pGEX vectors are designed to include thrombin or factor Xa protease cleavage sites, so that the cloned target gene product can be released from the GST moiety. However, if the resulting fusion protein is insoluble and forms inclusion bodies in the host cell, the inclusion bodies may be purified and the recombinant protein solubilized using techniques well-known to one of skill in the art.

[0077] In an exemplary insect system, Autographa californica nuclear polyhedrosis virus (AcNPV) is used as a vector to express one or more GTS sequence (see, e.g., Smith et al., Mol. Cell. Biol. 3:2156-2165, 1983, and U.S. Pat. No. 4,215,051). In one embodiment of the current invention, Sf9 insect cells are infected with a virus vector that directs the expression of a GTS peptide or protein in the insect cells.

[0078] In mammalian host cells, a number of viral-based expression systems may be utilized. Specific embodiments (described more fully below) include, but are not limited to, use of a CMV promoter to transiently express any of the cDNA sequences of the current invention in U937 or Cos-7 cells. Alternatively, retroviral vector systems well-known in the art may be used to insert the recombinant expression construct into host cells. Additionally, in certain embodiments vaccinia virus-based expression systems may be employed.

[0079] In yeast, a number of vectors containing constitutive or inducible promoters may be used, see, e.g.: “Current Protocols in Molecular Biology”, supra, Ch. 13; Bitter et al., Methods in Enzymol. 153:516-544, 1987, “DNA Cloning”, Vol. II, Ch. 3 (Glover, ed., IRL Press, Washington, D.C., 1986); Bitter, Methods in Enzymol. 152:673-684, 1987, and “The Molecular Biology of the Yeast Saccharomyces”, Vols. I and II, (Strathern et al., eds., Cold Spring Harbor Press, 1982).

[0080] In plants, a number of plant expression vectors can be used, and the expression of the coding sequence may be driven by any of a number of promoters. For example: viral promoters such as the 35S and 19S RNA promoters of CaMV (Brisson et al., Nature 310:511-514, 1984), or the coat protein promoter of TMV (Takamatsu et al., EMBO J. 6:307-311, 1987); plant promoters such as that of the small subunit of RUBISCO (Coruzzi et al., EMBO J. 3:1671-1680, 1984, and Broglie et al., Science 224:838-843, 1984); or heat shock promoters, e.g., soybean hsp17.5-E or hsp17.3-B (Gurley et al., Mol. Cell. Biol. 6:559-565, 1986); may be used. These constructs can be introduced into plant cells using Ti or Ri plasmids, plant virus vectors, direct DNA transformation, microinjection, electroporation, and other methods that are well-known to those of skill in the art, see, e.g., Weissbach and Weissbach, in “Methods for Plant Molecular Biology”, Section VIII, pp. 421-463, (Schuler and Zielinsky, eds., Academic Press, N.Y., 1988), and “Plant Molecular Biology”, 2d Ed., Ch. 7-9 (Grierson, ed., Blackie Academic and Professional, London, 1988).

[0081] When an adenovirus is used as an expression vector, the nucleotide sequence of interest may be ligated to an adenovirus transcription/translation control complex, e.g., the late promoter and tripartite leader sequence. This chimeric gene may then be inserted in the adenovirus genome by in vitro or in vivo recombination. Insertion in a non-essential region of the viral genome (e.g., region E1 or E3) will result in a recombinant virus that is viable and capable of expressing the gene product of interest in infected hosts. (see, e.g., Logan and Shenk, Proc. Natl. Acad. Sci. USA 81:3655-3659, 1984). Specific initiation signals may also be required for efficient translation of inserted nucleotide sequences of interest. These signals include the ATG initiation codon and adjacent sequences. In cases where an entire gene or cDNA, including its own initiation codon and adjacent sequences, is inserted into the appropriate expression vector, no additional translational control signals may be needed. However, in cases where only a portion of a coding sequence of interest is inserted, exogenous translational control signals, including, perhaps, the ATG initiation codon, may be provided. Furthermore, the initiation codon should be in phase with the reading frame of the desired coding sequence to ensure translation of the entire insert. These exogenous translational control signals and initiation codons can be of a variety of origins, both natural and synthetic. The efficiency of expression may be enhanced by the inclusion of appropriate transcription enchanter elements, transcription terminators, etc. (see, e.g., Nevins, CRC Crit. Rev. Biochem. 19:307-322, 1986).

[0082] In addition, a host cell strain may be chosen that modulates the expression of the inserted sequences, or modifies and processes the gene product, in the specific fashion desired. Such modifications (e.g., glycosylation) and processing (e.g., cleavage) of protein products may be important for the function of the protein. Different host cells have characteristic and specific mechanisms for the post-translational processing and modification of proteins and gene products. Appropriate cell lines or host systems can be chosen to ensure the desired modification and processing of the foreign protein expressed. To this end, eukaryotic host cells, which possess the cellular machinery for proper processing of the primary transcript, may be used. Such mammalian host cells include, but are not limited to, CHO, VERO, BHK, Hela, COS, MDCK, 293, 3T3, WI38, and U937 cells.

[0083] For long-term, high-yield production of recombinant proteins, stable expression is preferred. For example, cell lines that stably express the sequences disclosed herein may be engineered. Rather than using expression vectors that contain viral origins of replication, host cells can be transformed with DNA controlled by appropriate expression control elements (e.g., promoter, enchanter sequences, transcription terminators, polyadenylation sites, etc.), and a selectable marker. Following the introduction of the foreign DNA, engineered cells may be allowed to grow for 1-2 days in an enriched media, and then switched to a selective media. The selectable marker in the recombinant plasmid confers resistance to the selection and allows cells to stably integrate the plasmid into their chromosomes and grow to form foci, which in turn can be cloned and expanded into cell lines. This method may advantageously be used to engineer cell lines that express the gene product of interest. Such engineered cell lines may be particularly useful in screening and evaluating compounds that affect the endogenous activity of the gene product of interest.

[0084] A number of selection systems may be used, including, but not limited to, the herpes simplex virus thymidine kinase (Wigler et al., Cell 11:223-232, 1977), hypoxanthine-guanine phosphoribosyltransferase (Szybalska and Szybalski, Proc. Natl. Acad. Sci. USA 48:2026-2034, 1962), and adenine phosphoribosyltransferase (Lowy et al., Cell 22:817-823, 1980) genes, which can be employed in tk⁻, hgprt⁻ or aprt⁻ cells, respectively. Also, anti-metabolite resistance can be used for selection with the following genes: dihydrofolate reductase (dhfr), which confers resistance to methotrexate (Wigler et al., Proc. Natl. Acad. Sci. USA 77:3567-3570, 1980, and O'Hare et al., Proc. Natl. Acad. Sci. USA 78:1527-1531, 1981); guanine phosphoribosyl transferase (gpt), which confers resistance to mycophenolic acid (Mulligan and Berg, Proc. Natl. Acad. Sci. USA 78:2072-2076, 1981); neomycin phosphotransferase (neo), which confers resistance to G-418 (Colbere-Garapin et al., J. Mol. Biol. 150:1-14, 1981); and hygromycin B phosphotransferase (hpt), which confers resistance to hygromycin (Santerre et al., Gene 30:147-156, 1984).

[0085] The gene product of interest can also be expressed in a transgenic animal. Animals of any species, including, but not limited to, mice, rats, rabbits, guinea pigs, pigs, micro-pigs, goats, and non-human primates, e.g., baboons, monkeys, and chimpanzees, may be used to generate transgenic animals that express the instant gene product of interest.

[0086] Any technique known in the art may be used to introduce the transgene of interest into animals to produce the founder lines of transgenic animals. Such techniques include, but are not limited to: pronuclear microinjection (U.S. Pat. No. 4,873,191); retrovirus-mediated gene transfer into germ lines (Van der Putten et al., Proc. Natl. Acad. Sci. USA 82:6148-6152, 1985); gene targeting in embryonic stem cells (Thompson et al., Cell 56:313-321, 1989); electroporation of embryos (Lo, Mol. Cell. Biol. 3:1803-1814, 1983); sperm-mediated gene transfer (Lavitrano et al., Cell 57:717-723, 1989); and positive-negative selection, as described in U.S. Pat. No. 5,464,764. For a review of such techniques, see, e.g., Gordon, Intl. Rev. Cytol. 115:171-229, 1989.

[0087] The present invention provides for transgenic animals that carry the transgene of interest in all their cells, as well as animals that carry the transgene in some, but not all, of their cells, i.e., mosaic animals. The transgene may be integrated as a single transgene or in concatamers, e.g., head-to-head tandems or head-to-tail tandems. The transgene may also be selectively introduced into, and activated in, a particular cell-type by following, for example, the teaching of Lasko et al., Proc. Natl. Acad. Sci. USA 89:6232-6236, 1992). The regulatory sequences required for such a cell-type specific activation will depend upon the particular cell-type of interest, and are well-known to those of skill in the art.

[0088] When it is desired that the transgene of interest be integrated into the chromosomal site of the endogenous copy of the gene corresponding to the transgene (“the endogenous gene”), gene targeting is preferred. Briefly, in this technique vectors containing some nucleotide sequences homologous to the endogenous gene are designed for the purpose of integrating, via homologous recombination with chromosomal sequences, into and disrupting the function of the endogenous gene. In this way, the expression of the endogenous gene may also be eliminated by inserting non-functional sequences into the endogenous gene. The transgene may also be selectively introduced into a particular cell-type, thus inactivating the endogenous gene in only that cell-type, by following, for example, the teaching of Gu et al., Science 265:103-106, 1994. The regulatory sequences required for cell-type specific inactivation will depend upon the particular cell-type of interest, and will be apparent to those of skill in the art.

[0089] Once transgenic animals have been generated, the expression of the recombinant gene of interest may be assayed utilizing standard techniques. Initial screening may be accomplished by Southern blot analysis or PCR techniques to analyze animal tissues to assay whether integration of the transgene has taken place. The level of mRNA expression of the transgene in the tissues of the transgenic animals may also be assessed using techniques that include, but are not limited to, Northern blot analysis of cell-type samples obtained from the animal, in situ hybridization analysis, and RT-PCR. Samples of gene-expressing tissue may also be evaluated immunocytochemically using antibodies selective for the transgene product, as described below.

### 6.3 Cells that Contain a Disrupted Allele of a Gene Encoding a Polynucleotide of the Current Invention

[0090] Another aspect of the current invention are cells that contain a disrupted version of a gene that corresponds to a sequence of the current invention. There are a variety of techniques that can be used to disrupt a gene in a cell, and especially an ES cell. Examples of such methods are described in co-pending U.S. patent application Ser. No. 08/728,963, and U.S. Pat. Nos. 5,789,215, 5,487,992, 5,627,059, 5,631,153, 6,087,555, 6,136,566, 6,139,833, and 6,207,371.

### 6.3.1 Identification of Cells that Express Genes Encoding Polynucleotides of the Current Invention

[0091] Host cells that contain a coding sequence and/or express a biologically active gene product of the present invention, or fragment thereof, may be identified by at least four general approaches; (a) DNA-DNA or DNA-RNA hybridization; (b) the presence or absence of “marker” gene functions; (c) assessing the level of transcription of the coding sequence as measured by the expression of mRNA transcripts in the host cell; and (d) detection of a gene product of the present invention, as measured by immunoassay, enzymatic assay, chemical assay, or the biological activity of the gene product. Prior to screening for gene expression, the host cells can first be treated in an effort to increase the level of expression of sequences encoding the gene products of the present invention, especially in cell lines that produce low amounts of mRNAs and/or peptides and proteins.

[0092] In approach (a) above, the presence of a coding sequence of the present invention can be detected by DNA-DNA or DNA-RNA hybridization using probes comprising nucleotide sequences that are homologous or complementary to a coding sequence of the present invention, or portions or derivatives thereof.

[0093] In approach (b), the recombinant expression vector/host system can be identified and selected based upon the presence or absence of certain “marker” gene functions (e.g., thymidine kinase activity, resistance to antibiotics, resistance to methotrexate, transformation phenotype, occlusion body formation in baculovirus, etc.). For example, if a coding sequence of the present invention is inserted within a marker gene sequence of a vector, recombinants containing the coding sequence can be identified by the absence of the marker gene function. Alternatively, a marker gene can be placed in tandem with a coding sequence of the present invention, under the control of the same or a different promoter used to control the expression of the coding sequence. Expression of the marker gene product in response to induction or selection indicates the presence of the coding sequence.

[0094] In approach (c), transcriptional activity of a coding region of the present invention can be assessed by hybridization assays. For example, RNA can be isolated and analyzed by Northern blot using a probe derived from a coding region of the present invention, or any portion thereof. Alternatively, total nucleic acids of the host cell may be extracted and assayed for hybridization to such probes. Additionally, RT-PCR (using oligonucleotides from a coding region of the present invention) may be used to detect low levels of gene expression in a sample, in RNA isolated from a spectrum of different tissues, or in cDNA libraries derived from different tissues, to determine which tissues express a given coding region of the present invention.

[0095] In approach (d), the expression of the peptides and proteins of the present invention can be assessed immunologically, for example by Western blots, immunoassays such as radioimmuno-precipitation, enzyme-linked immunoassays, and the like. This can be achieved by using an antibody, or a binding partner, that selectively binds to a peptide or protein of the present invention, as described below.

### 6.4 Antibodies to Gene Products of the Current Invention

[0096] Antibodies that selectively or specifically recognize one or more epitopes of a peptide or protein of the current invention, or epitopes of conserved variants of a peptide or protein at least partially encoded by a coding region of the present invention, or any and all peptide fragments thereof, are also encompassed by the invention. Such antibodies include, but are not limited to, polyclonal, monoclonal, humanized, chimeric, and single chain antibodies, Fab and F(ab′)₂ fragments, fragments produced by a Fab expression library, anti-idiotypic (anti-Id) antibodies, and epitope-binding fragments of any of the above.

[0097] The antibodies of the invention may be used, for example, in the detection of a gene product of interest of the current invention in a biological sample and can thus be utilized as part of diagnostic or prognostic techniques where patients may be tested for abnormal amounts of these peptides or proteins. Such antibodies may also be utilized in conjunction with, for example, compound screening schemes, as described below, for the evaluation of the effect of test compounds on expression and/or activity of the gene products of the current invention of interest. Additionally, such antibodies can be used in conjunction with gene therapy and gene delivery techniques, as described herein, to evaluate normal and/or engineered cells that express a gene product of the present invention prior to introduction into a patient, or as a part of treatment methods for development and/or cell differentiation disorders. Such antibodies can also be used to inhibit the activity of a peptide or protein of the present invention.

[0098] To produce antibodies, a suitable host animal may be immunized by injection with a peptide or protein of the present invention, a subunit, truncation, functional equivalent, or mutant of such a peptide or protein, or denatured forms of the above. Suitable host animals include, but are not limited to, rabbits, mice, and rats, to name but a few. Depending on the host species, various adjuvants may be used to increase the immunological response, including, but not limited to, Freund's adjuvant (complete and incomplete), mineral salts such as aluminum hydroxide or phosphate, surface active substances such as lysolecithin, pluronic polyols, polyanions, peptides, oil emulsions, and potentially useful human adjuvants such as BCG (Bacille Calmette-Guerin) and Corynebacterium parvum. The immune response can also be enhanced by combination and/or coupling with molecules such as keyhole limpet hemocyanin, ovalbumin, tetanus or diphtheria toxoid, cholera toxin, or fragments thereof. Polyclonal antibodies are heterogeneous populations of antibody molecules derived from the sera of the immunized animals.

[0099] Monoclonal antibodies (MAbs), which are homogeneous populations of antibodies to a particular antigen, may be obtained by any technique that provides for the production of antibody molecules by continuous cell lines in culture. These include, but are not limited to, the hybridoma technique (Kohler and Milstein, Nature 256:495-497, 1975, and U.S. Pat. No. 4,376,110), the human B-cell hybridoma technique (Kosbor et al., Immunology Today 4:72, 1983, and Cole et al., Proc. Natl. Acad. Sci. USA 80:2026-2030, 1983), and the EBV-hybridoma technique (Cole et al., in “Monoclonal Antibodies and Cancer Therapy”, Vol. 27, UCLA Symposia on Molecular and Cellular Biology, New Series, pp. 77-96 (Reisfeld and Sell, eds., Alan R. Liss, Inc. N.Y., 1985)). Such antibodies may be of any immunoglobulin class, including IgG, IgM, IgE, IgA, and IgD, and any subclass thereof. A hybridoma producing a mAb of the invention may be cultivated in vitro or in vivo. In certain instances, production of high titers of mAbs in vivo is the preferred method of production.

[0100] In addition, techniques developed for the production of “chimeric antibodies” (Morrison et al., Proc. Natl. Acad. Sci. USA 81:6851-6855, 1984, Neuberger et al., Nature 312:604-608, 1984, and Takeda et al., Nature 314:452-454, 1985) can be used, for example by splicing the genes from a mouse antibody molecule of appropriate antigen specificity together with genes from a human antibody molecule of appropriate biological activity. A chimeric antibody is one in which different portions are derived from different animal species, such as those having a variable region derived from a porcine mAb, and a human immunoglobulin constant region. Such technologies are described in U.S. Pat. Nos. 6,075,181 and 5,877,397.

[0101] Alternatively, techniques described for the production of single chain antibodies (U.S. Pat. No. 4,946,778, Bird, Science 242:423-426, 1988, Huston et al., Proc. Natl. Acad. Sci. USA 85:5879-5883, 1988, and Ward et al., Nature 341:544-546, 1989) can be adapted to produce single chain antibodies against a gene product of the present invention of interest. Single chain antibodies are formed by linking the heavy and light chain fragments of the Fv region via an amino acid bridge, resulting in a single chain polypeptide.

[0102] Antibody fragments that recognize specific epitopes may be generated by known techniques. For example, such fragments include, but are not limited to: F(ab′)₂ fragments, which can be produced by pepsin digestion of an antibody molecule; and Fab fragments, which can be generated by reducing the disulfide bridges of F(ab′)₂ fragments. Alternatively, Fab expression libraries may be constructed (Huse et al., Science 246:1275-1281, 1989) to allow rapid and easy identification of monoclonal Fab fragments with the desired specificity.

[0103] Antibodies to the peptides and proteins of the present invention, or fragments or truncated versions thereof, can in turn be utilized to generate anti-idiotypic antibodies that “mimic” an epitope of the peptide or protein, using techniques well-known to those skilled in the art (see, e.g., Greenspan and Bona, FASEB J. 7:437-444, 1993, and Nissinoff, J. Immunol. 147:2429-2438, 1991). For example, antibodies that bind to a peptide or protein of the current invention and competitively inhibit the binding of such a peptide or protein to any of its binding partners in the cell, can be used to generate anti-idiotypes that “mimic” the peptide or protein and, therefore, bind and neutralize a particular binding partner of the peptide or protein. Such neutralizing antibodies, anti-idiotypes, Fab fragments of such antibodies, or humanized derivatives thereof, can be used in therapeutic regimens to mimic or neutralize (depending on the antibody) the effect of a particular peptide or protein, or a particular binding partner of a peptide or protein, of interest.

### 6.5 Diagnosis of Disorder Affecting Development and Cell Differentiation

[0104] A variety of methods can be employed for the diagnostic and prognostic evaluation of disorders involving developmental and/or differentiation processes, and for identification of subjects having a predisposition to such disorders, which may, for example, utilize reagents such as the instant nucleotide sequences and/or antibodies to the instant gene products. For example, such reagents may be used to detect: (1) mutations within, or over- or under-expression of, the respective mRNAs relative to the non-disorder state; (2) an over- or under-abundance of the respective gene product relative to the non-disorder state; and (3) perturbations or abnormalities in the intra- and/or inter-cellular processes mediated by the peptides or proteins of the current invention.

[0105] The methods described herein may be performed, for example, by utilizing pre-packaged diagnostic kits comprising at least one specific nucleotide sequence or antibody reagent of the present invention, which may be conveniently used, e.g., in clinical settings, to diagnose patients exhibiting developmental or cell differentiation disorder abnormalities.

[0106] For the detection of mutations in any of the genes of the present invention, any nucleated cell can be used as a starting source for genomic nucleic acid. For the detection of gene expression or gene products, any cell-type or tissue in which the gene of interest is expressed, such as, for example, ES cells, may be utilized. Examples of cells and/or tissues that can be analyzed using the polynucleotides and/or antibodies of the present invention include, but are not limited to, endothelial cells, epithelial cells, islets, neurons or neural tissue, mesothelial cells, osteocytes, lymphocytes, chondrocytes, hematopoietic cells, immune cells, cells of the major glands or organs (e.g., lung, heart, stomach, pancreas, kidney, skin, etc.), exocrine and/or endocrine cells, embryonic and other stem cells, fibroblasts, and culture adapted and/or transformed versions of the above.

[0107] In addition to developmental and/or cell differentiation disorders or abnormalities, diseases or natural processes that can be correlated with the expression of the disclosed GTSs (mutant or normal) include, but are not limited to, aging, cancer, autoimmune disease, lupus, scleroderma, inflammatory bowel disease, Crohn's disease, multiple sclerosis, glandular disorders, immune disorders, schizophrenia, inflammatory disorders, psychosis, alopecia, ataxia telangiectasia, osteo and rheumatoid arthritis, diabetes, skin disorders such as acne, eczema, and the like, high blood pressure, pulmonary disease, atherosclerosis, cardiovascular disease, degenerative diseases of the neural or skeletal systems, Alzheimer's disease, Parkinson's disease, osteoporosis, asthma, genetic birth defects, infertility, epithelial ulcerations, and viral, parasitic, fungal, yeast, or bacterial infections.

[0108] Primary, secondary, or culture-adapted variants of cancer cells/tissues can also be analyzed using the polynucleotides and/or antibodies, or fragments thereof, of the present invention. Examples of such cancers include, but are not limited to: Cardiac: sarcoma (angiosarcoma, rhabdomyosarcoma, fibrosarcoma, liposarcoma), myxoma, fibroma, lipoma, teratoma and rhabdomyoma; Lung: bronchogenic carcinoma (squamous cell, undifferentiated small or large cell, adenocarcinoma), alveola (bronchiola) carcinoma, bronchial adenoma, sarcoma, lymphoma, chondromatous hamartoma, mesothelioma; Gastrointestinal: esophagus (adenocarcinoma, leiomyosarcoma, squamous cell carcinoma, lymphoma), stomach (carcinoma, leiomyosarcoma, lymphoma), pancreas (gastrinoma, carcinoid tumors, vipoma, ductal adenocarcinoma, insulinoma, glucagonoma), small bowel (adenocarcinoma, lymphoma, carcinoid tumors, neurofibroma, Karposi's sarcoma, leiomyoma, hemangioma, lipoma, fibroma), large bowel (adenocarcinoma, tubular adenoma, villous adenoma, hamartoma, leiomyoma); Genitourinary tract: kidney (Wilm's tumor [nephroblastoma], adenocarcinoma, lymphoma, leukemia), bladder and urethra (squamous cell carcinoma, transitional cell carcinoma, adenocarcinoma), prostate (adenocarcinoma, sarcoma), testis (seminoma, teratoma, embryonal carcinoma, teratocarcinoma, choriocarcinoma, sarcoma, interstitial cell carcinoma, fibroma, fibroadenoma, adenomatoid tumors, lipoma); Liver: hepatoma (hepatocellular carcinoma), hepatoblastoma, hemangioma, angiosarcoma, cholangiocarcinoma, hepatocellular adenoma; Bone: osteogenic sarcoma (osteosarcoma), malignant fibrous histiocytpma, fibrosarcoma, chondrosarcoma, malignant lymphoma (reticulum cell sarcoma), multiple myeloma, malignant giant cell tumor, chordoma, Ewing's sarcoma, osteochronfroma (osteocartilaginous exostoses), benign chondroma, osteoid osteoma, chondroblastoma, chondromyxofibroma, and giant cell tumors; Nervous system: skull (osteoma, hemangioma, granuloma, xanthoma, osteitis deformans), meninges (meningiosarcoma, meningioma, gliomatosis), brain (astrocytoma, medulloblastoma, glioma, ependymoma, germinoma [pinealoma], glioblastoma multiforme, oligodendroglioma, schwannoma, retinoblastoma, congenital tumors), spinal cord (neurofibroma, meningioma, glioma, sarcoma); Gynecological: uterus (endometrial carcinoma), cervix (cervical carcinoma, pre-tumor cervical dysplasia), ovary (ovarian carcinoma [clear cell carcinoma, serous cystadenocarcinoma, mucinous cystadenocarcinoma, endometrioid tumors, celioblastoma, unclassified carcinoma], granulosa-thecal cell tumors, Sertoli-Leydig cell tumors, dysgerminoma, malignant teratoma), vulva (intraepithelial carcinoma, melanoma, squamous cell carcinoma, adenocarcinoma, fibrosarcoma), vagina (clear cell carcinoma, squamous cell carcinoma, botryoid sarcoma [embryonal rhabdomyosarcoma]), fallopian tubes (carcinoma); Hematologic: blood (myeloid leukemia [acute and chronic], acute lymphoblastic leukemia, chronic lymphocytic leukemia, myeloproliferative diseases, multiple myeloma, myelodysplastic syndrome), Hodgkin's disease, non-Hodgkin's lymphoma [malignant lymphoma]; Skin: malignant melanoma, squamous cell carcinoma, basal cell carcinoma, Karposi's sarcoma, dysplastic nevi, moles, lipoma, angioma, dermatofibroma, keloids, psoriasis; Breast: carcinoma and sarcoma; and Adrenal glands: neuroblastoma.

[0109] Detection techniques that can be used to conduct the above analyses are described in greater detail below.

### 6.5.1. Detection of Genes of the Current Invention and Their Respective Transcripts

[0110] Mutations within the genes of the current invention can be detected utilizing a number of techniques. Nucleic acid from any nucleated cell can be isolated according to standard procedures that are well-known to those of skill in the art, and used as the starting point for such assay techniques.

[0111] DNA may be used in hybridization and/or amplification assays of biological samples to detect abnormalities involving gene structure, including chromosomal rearrangements, point mutations, insertions and deletions. Such assays include, but are not limited to, Southern, single stranded conformational polymorphism (SSCP), and PCR analyses. Also, well-known genotyping techniques can be performed to identify an individual carrying a mutation in any of the instant genes. Such techniques include, for example, the use of restriction fragment length polymorphisms (RFLPs), which involve sequence variations in one or more of the recognition sites for a particular restriction enzyme used in the analysis.

[0112] Such diagnostic methods for the detection of such gene structure abnormalities can involve, for example, contacting and incubating nucleic acids obtained from a sample, e.g., derived from a patient sample and/or other appropriate cellular source, with one or more labeled nucleic acid reagents, under conditions favorable for specific annealing of these reagents to their complementary sequences within the sample nucleic acids. Examples of nucleic acids that can be obtained from a sample and/or used as labeled nucleic acid reagents include, but are not limited to, recombinant DNA molecules, cloned genes, or degenerate variants thereof. Generally, the labeled nucleic acid reagents are at least 15 to 30 nucleotides in length. After incubation, the non-annealed nucleic acids are removed from the nucleic acid molecule hybrid. The presence of nucleic acids that have hybridized, if any such molecules exist, is then detected.

[0113] In such detection schemes, the nucleic acids from the cell-type and/or tissue of interest can be immobilized, for example, to a solid support such as a membrane, or a plastic surface such as that on a microtiter plate or polystyrene beads. After incubation in such schemes, the non-annealed labeled nucleic acid reagents are easily removed. Detection of the remaining annealed labeled nucleic acid reagents can be accomplished using standard techniques well-known to those in the art. The annealing pattern obtained can be compared to the annealing pattern expected from a normal gene sequence, in order to determine whether a gene mutation is present.

[0114] Alternative diagnostic methods for detection of gene-specific nucleic acid molecules, in patient samples and/or other appropriate cell sources, may involve amplification, e.g., by PCR (see, e.g., U.S. Pat. No. 4,683,202), followed by detection of the amplified molecules using techniques well-known to those of skill in the art. The resulting amplified sequences can be compared to those expected if the nucleic acid being amplified contained only normal copies of the respective gene, to determine whether a gene mutation exists.

[0115] Furthermore, the polynucleotide sequences of the current invention may be mapped to chromosomes, and specific regions of chromosomes, using well-known genetic and/or chromosomal mapping techniques. These techniques include in situ hybridization, linkage analysis against known chromosomal markers, hybridization screening with libraries or flow-sorted chromosomal preparations specific to known chromosomes, and the like. The technique of fluorescent in situ hybridization of chromosome spreads has been described, for example, in “Human Chromosomes: A Manual of Basic Techniques” (Verma and Babu, eds., Pergamon, Oxford, 1989). Fluorescent in situ hybridization of chromosomal preparations, as well as other physical chromosome mapping techniques, may be correlated with additional genetic map data. Examples of genetic map data can be found, for example, in “Genetic Maps: Locus Maps of Complex Genomes” Book 5: Human Maps, (O'Brien, ed., Cold Spring Harbor Laboratory Press, Cold Spring Harbor, N.Y., 1990). Comparisons of physical chromosomal map data may be of particular interest in detecting genetic diseases in carrier states.

[0116] Additionally, the level of expression of the genes of the present invention can be assayed, by detecting and measuring the transcription of such genes. For example, RNA from a cell-type or tissue known to express, or suspected of expressing, any of the genes of the current invention can be isolated and tested utilizing hybridization and/or PCR techniques (e.g., northern blot and/or RT-PCR). Such analyses may reveal both quantitative and qualitative aspects of the expression pattern of the respective gene, including activation or inactivation of gene expression. Also, in situ hybridization, using a suitable radioactively, enzymatically, or chemically labeled probe based on the instant nucleotide sequences, can be used to assess expression patterns in vivo.

[0117] GTS oligonucleotides can also be used as hybridization probes for screening libraries and assessing gene expression patterns (particularly using a microarray or high-throughput “chip” format). Such GTS hybridization probes can also be used in conjunction with a solid support matrix/substrate (e.g., resins, beads, membranes, plastics, polymers, metal or metallized substrates, crystalline or polycrystalline substrates, etc.). Of particular note are spatially addressable arrays (i.e., gene chips, microtiter plates, etc.) of oligonucleotides and/or polynucleotides, or corresponding oligopeptides and/or polypeptides, wherein at least one of the biopolymers present on the spatially addressable array comprises an oligonucleotide or polynucleotide sequence from at least one of SEQ ID NOS:10-5,504, or an amino acid sequence encoded thereby. Methods for attaching biopolymers to, or synthesizing biopolymers on,, solid support matrices, and conducting binding studies thereon, are disclosed in U.S. Pat. Nos. 5,700,637, 5,556,752, 5,744,305, 4,631,211, 5,445,934, 5,252,743, 4,713,326, 5,424,186, and 4,689,405.

[0118] Additionally, the presently described GTSs, or primers derived therefrom, can be used to screen spatially addressable arrays, or pools therefrom, of clones present in a full-length human cDNA library. The 96 well microtiter plate format is especially well suited to the screening, by PCR for example, of pooled subfractions of cDNA clones.

[0119] Addressable arrays comprising oligonucleotide sequences from any of SEQ ID NOS:10-5,504 can also be used to identify and characterize the temporal and/or tissue specific expression of the corresponding genes. These arrays use oligonucleotide sequences of sufficient length to confer the desired specificity, yet be within the limitations of the production technology. The probes are generally between from about 8 to about 2000 nucleotides in length. In certain embodiments, the probes consist of 60 contiguous, or 25 contiguous, nucleotides from any of SEQ ID NOS:10-5,504.

[0120] For example, a series of GTS oligonucleotide sequences, or the complements thereof, can be used in chip format to represent all, or a portion, of a particular GTS sequence. The oligonucleotides are typically between about 16 to about 40 nucleotides in length (or any whole number within the stated range). The GTS sequences can be represented using oligonucleotides that partially overlap each other, and/or using oligonucleotides that do not overlap. Accordingly, a particular GTS sequence can be represented on a chip by at least two or three distinct oligonucleotides that comprise at least 8 contiguous nucleotides from the particular GTS sequence, or the complement thereof. Such oligonucleotides can begin at any nucleotide position within a GTS sequence, and continue in either a sense (5′-to-3′) or antisense (3′-to-5′) orientation vis-a-vis the GTS sequence.

[0121] Microarray-based analysis allows the discovery of broad patterns of genetic activity, providing new understanding of gene functions, and generating novel and unexpected insight into transcriptional processes and biological mechanisms. The use of addressable arrays comprising sequences first disclosed in SEQ ID NOS:10-5,504 provides detailed information about transcriptional changes involved in a specific pathway, potentially leading to identification of novel components or gene functions that manifest themselves as novel phenotypes.

[0122] Probes consisting of sequences first disclosed in SEQ ID NOS:10-5,504 can also be used in the identification, selection, and validation of novel molecular targets for drug discovery. The use of these unique sequences permits the direct confirmation of drug targets, and recognition of drug-dependent changes in gene expression that are modulated through pathways distinct from the intended target of the drug. These unique sequences therefore also have utility in defining and monitoring both drug action and toxicity.

[0123] As just one example of utility, any one or more of the sequences first disclosed in SEQ ID NOS:10-5,504 can be utilized in microarrays, or other assay formats, to screen collections of genetic material from patients who have a particular medical condition. These investigations can also be carried out in silico, and by comparing previously collected genetic databases with the disclosed GTS sequences using computer software known to those in the art.

[0124] Although the disclosed GTSs have been specifically described using nucleotide sequence, it should be appreciated that each of the GTSs can uniquely be described using any of a wide variety of additional structural attributes, or combinations thereof. For example, a given GTS can be described by the net composition of the nucleotides present within a given region of the GTS, in conjunction with the presence of one or more specific oligonucleotide sequence(s) first disclosed in the GTS. Alternatively, a restriction map specifying the relative positions of restriction endonuclease digestion sites, or various palindromic or other specific oligonucleotide sequences, can be used to structurally describe a given GTS. Such restriction maps, which are typically generated by widely available computer programs (e.g., the University of Wisconsin GCG sequence analysis package (SEQUENCHER 3.0, Gene Codes Corp.), etc.), can also be used in conjunction with one or more discrete nucleotide sequence(s) present in a GTS, which can be described by the position of the sequence relative to one or more additional sequence(s) or restriction sites in the GTS.

### 6.5.2 Detection of Gene Products of the Current Invention

[0125] Antibodies directed against wild-type or mutant gene products of the current invention, or conserved variants or peptide fragments thereof, which are discussed above in Section 6.4, may be used as diagnostics and/or prognostics for disorders affecting development and cellular differentiation. Such diagnostic and prognostic methods may be used to detect abnormal levels of gene expression, and/or abnormal structure or location (temporal, tissue, cellular, or subcellular) of the respective gene product. Such assays may be performed in vivo or in vitro, for example on biopsy tissue.

[0126] The tissue or cell-type to be analyzed generally include those that are known to contain, or suspected of containing, cells that express the respective gene. The protein isolation methods employed herein may, for example, be those previously described (“Antibodies: A Laboratory Manual”, supra). The isolated cells can be derived from cell culture or a patient. The analysis of cells taken from culture may be a necessary step in assessment of cells that can be used as part of a cell-based gene therapy technique, or, alternatively, to test the effect of compounds on expression of the respective gene.

[0127] The presently described antibodies, antibody fragments, and fusion proteins are also useful to quantitatively or qualitatively detect the presence of gene products of the current invention, or conserved variants or peptide fragments thereof. This can be accomplished, for example, by immunofluorescence techniques employing a fluorescently labeled antibody, antibody fragment, or fusion protein, with light microscopic, flow cytometric, or fluorimetric detection.

[0128] The antibodies, antibody fragments, and/or fusion or conjugated gene products of the present invention may also be employed histologically, for example in immunofluorescence, immunoelectron microscopy, in situ detection, non-immuno assays, and/or for catalytic subunit binding analysis. The binding activity of each lot of antibody, antibody fragment, or fusion protein can be determined according to well-known methods, which can be used to determine operative and optimal assay conditions by employing routine experimentation.

[0129] In situ detection may be accomplished by removing a histological specimen from a patient, and applying thereto a labeled antibody, a fragment thereof, or fusion protein of the present invention, preferably by overlaying onto a biological sample. Through the use of such a procedure, it is possible to determine the presence and distribution of a gene product, conserved variant, or peptide fragment of the current invention in the examined tissue. Those of ordinary skill will readily perceive that any of a wide variety of histological methods (such as staining procedures) can be modified in order to achieve such in situ detection.

[0130] Immunoassays and non-immunoassays for any of the gene products of the current invention will typically comprise incubating a biological sample, such as a biological fluid, a tissue extract, freshly harvested cells, or lysates of cells that have been incubated in cell culture, in the presence of a labeled antibody, antibody fragment, or fusion protein able to selectively bind to the respective gene product of interest, and detecting the bound antibody, fragment, or fusion protein by any of a number of techniques well-known in the art.

[0131] The biological sample may be brought in contact with and immobilized onto a solid phase support or carrier, such as nitrocellulose, that is capable of immobilizing cells, cell particles or soluble proteins. The support may then be washed with one or more suitable buffers, followed by treatment with a labeled antibody, antibody fragment, or fusion protein that selectively binds to the particular gene product of interest. The solid phase support may then be washed with buffer(s) to remove unbound label. The amount of label remaining on the solid support may then be detected by conventional means.

[0132] The term “solid phase support or carrier” encompasses any support capable of binding an antigen, antibody, cell, or cell particle. Well-known supports include glass, polypropylene, polyethylene, dextran, nylon, amylases, natural and modified celluloses, polyacrylamides, gabbros, and magnetite. The nature of the carrier can be soluble to some extent, or insoluble, for the purposes of the present invention. The support material may have virtually any possible structural configuration, as long as the bound moiety is capable of binding to an antigen, antibody, antibody fragment, or fusion protein. Thus, the support configuration may be spherical, as a bead, cylindrical, as the inside surface of a test tube or the external surface of a rod, or flat, as a sheet or test strip. Preferred supports include, but are not limited to, polystyrene beads, with others known to skilled artisans, or determined with routine experimentation.

[0133] An antibody or fragment thereof can be detectably labeled by linkage to an enzyme, and used in an enzyme immunoassay (see, e.g., Voller, Diagnostic Horizons 2:1-7, 1978 (Microbiological Associates Quarterly Publication, Walkersville, Md.), Voller et al., J. Clin. Pathol. 31:507-520, 1978, Butler, Meth. Enzymol. 73:482-523, 1981, “Enzyme Immunoassay” (Maggio, ed., CRC Press, Boca Raton, Fla., 1980), “Enzyme Immunoassay” (Ishikawa et al., eds., Kgaku-Shoin, Tokyo, Japan, 1981)). The enzyme bound to the antibody or antibody fragment can react with an appropriate substrate, for example a chromogenic substrate, to produce a chemical moiety that can be detected, for example, by visual, fluorimetric, or spectrophotometric means. Enzymes that can be used in such techniques include, but are not limited to, staphylococcal nuclease, malate dehydrogenase, delta-5-steroid isomerase, yeast alcohol dehydrogenase, horseradish peroxidase, urease, triose phosphate isomerase, alkaline phosphatase, catalase, ribonuclease, asparaginase, glucose oxidase, glucoamylase, beta-galactosidase, alpha-glycerophosphate dehydrogenase, glucose-6-phosphate dehydrogenase, and acetylcholinesterase.

[0134] Alternatively, radioactive labeling of the antibody or antibody fragment allows detection of the peptide or protein of interest through the use of a radioimmunoassay. The radioactivity can be detected, for example, using a gamma counter, a scintillation counter, or by autoradiography.

[0135] It is also possible to label an antibody or antibody fragment with a fluorescent compound. When the fluorescent label is exposed to light of the proper wavelength, its presence can be detected due to fluorescence. Among the most commonly used fluorescent labeling compounds are fluorescein isothiocyanate, rhodamine, phycoerythrin, phycocyanin, allophycocyanin, and fluorescamine. An antibody or antibody fragment can also be labeled using fluorescence emitting metals such as ¹⁵²Eu, or others of the lanthanide series, which can be attached to an antibody or antibody fragment using such metal chelating groups as diethylenetriaminepentacetic acid (DTPA) or ethylenediaminetetraacetic acid (EDTA).

[0136] An antibody or antibody fragment also can be detectably labeled by coupling to a chemiluminescent compound, such as luminol, isoluminol, theromatic acridinium ester, imidazole, acridinium salt, or oxalate ester. The labeled antibody or antibody fragment can be detected by luminescence that arises during the course of a chemical reaction. Additionally, a bioluminescent compound, such as luciferin, luciferase, or aequorin, can be used to label an antibody or antibody fragment. Bioluminescence is a type of chemiluminescence found in biological systems, in which a catalytic protein increases the efficiency of the chemiluminescent reaction. The presence of a bioluminescent protein is once again determined by detecting the presence of luminescence.

### 6.6 Screening Assays for Compounds that Modulate the Expression or Activity of the Instant Gene Products

[0137] A number of assays can be used to identify compounds that modulate the expression and/or activity of peptides and/or proteins at least partially encoded by any one or more of SEQ ID NOS:10-5,504 (i.e., the instant gene products). Such compounds may be useful, for example, in elaborating the biological function of the instant gene products, and for ameliorating disorders affecting development and/or cell differentiation. Such assays can be used to identify: compounds that interact with (e.g., bind to) the instant gene products; compounds that interact with intracellular proteins that interact with the instant gene products; compounds that interfere with or enhance the interaction of the instant gene products, either with each other, or with other intracellular proteins that interact with the instant gene products; and compounds that modulate the activity of the instant gene products (i.e., modulate the splicing or level of expression of nucleic acids that encode the instant gene products, or the level of the instant gene products themselves; see, e.g., Platt et al., J. Biol. Chem. 269:28558-28562, 1994).

[0138] Compounds that can be screened in such assays include, but are not limited to, proteins, peptides, antibodies, antibody fragments, prostaglandins, lipids, and other organic (e.g., terpines and peptidomimetics) or inorganic compounds. Such compounds can mimic the activity triggered by the natural ligand (i.e., agonists), or inhibit the activity triggered by the natural ligand (i.e., antagonists), including compounds that bind to and “neutralize” the natural ligand. Such compounds include those that can, for example, affect cell differentiation and/or development by: gaining entry into a particular cell (e.g., an ES cell) and affecting expression of a gene encoding one or more of the instant gene products or another gene involved in development and cell differentiation (e.g., by interacting with the regulatory region directly or with transcription factors involved in gene expression; and/or modulating the activity of one or more of the instant gene products (e.g., by inhibiting or enhancing binding to another cellular peptide, protein, or other factor, involved in function, catalysis, signal transduction, etc.).

[0139] Such compounds include, but are not limited to: peptides, including soluble peptides, from random peptide libraries (see, e.g., Lam et al., Nature 354:82-84, 1991, and Houghten et al., Nature 354:84-86, 1991), combinatorial chemistry-derived peptide libraries made from D- and/or L-configuration amino acids, phosphopeptides (such as members of random or partially degenerate directed phosphopeptide libraries; see, e.g., Songyang et al., Cell 72:767-778, 1993); antibodies (including, but not limited to, polyclonal, monoclonal, humanized, anti-idiotypic, chimeric, and single chain antibodies); and antibody fragments (including, but not limited to, Fab, F(ab′)₂ and Fab expression library fragments, and epitope-binding fragments thereof).

[0140] Computer modeling and searching technologies permit the identification of compounds, or the improvement of already identified compounds, that can modulate the expression or activity of the instant gene products. Having identified such compound or composition, the active sites or regions can be identified. Such active sites might typically be the binding partner sites, such as, for example, the interaction domains of the instant gene products with their respective binding partners. The active site can be identified using methods known in the art including, for example, comparison to the amino acid sequences, or coding sequences, of active sites of known proteins, or from study of complexes of a particular compound with its natural ligand, for example using chemical or X-ray crystallographic methods to identify the region of the ligand to which the compound binds.

[0141] The three dimensional geometric structure of the active site can then be determined using standard methods, including X-ray crystallography, which can determine a complete molecular structure, and solid or liquid phase NMR, which can be used to determine certain intra-molecular distances. Other experimental methods of structure determination can also be used to obtain a partial or complete geometric structure. The geometric structure may be measured with a complexed ligand, either natural or artificial, which may increase the accuracy of the determined active site structure.

[0142] If an incomplete or insufficiently accurate structure is determined, computer based numerical modeling methods can be used to complete the structure or improve the accuracy. A number of modeling methods are known to the skilled artisan, including, but not limited to, parameterized models specific to particular biopolymers such as proteins or nucleic acids, molecular dynamics models based on computing molecular motions, statistical mechanics models based on thermal ensembles, and combined models. For most types of models, standard molecular force fields, representing the forces between constituent atoms and groups, are necessary, and can be selected from force fields known in physical chemistry. The incomplete or less accurate structure can serve as a constraint on the structure computed by these methods.

[0143] Based on the structure of the active site, determined experimentally, by modeling, or a combination thereof, candidate modulating compounds can be identified by searching databases containing compounds and information on their molecular structure. Such a search seeks compounds having structures that match the determined active site structure and that interact with the groups defining the active site. Such a search can be manual, but is preferably computer assisted.

[0144] Additionally, these methods can be used to identify improved modulating compounds based on known modulating compounds or ligands. The composition of the known compound can be modified, and the structural effect of the modification determined, using the experimental and computer modeling methods described above. The altered structure is then compared to the active site structure to determine if an improved fit or interaction results. In this manner, systematic variations, such as by varying side groups, can be quickly evaluated to obtain modified modulating compounds or ligands with improved specificity and/or activity.

[0145] Further examples of molecular modeling systems are the CHARM and QUANTA programs (Polygon Corporation, Waltham, Mass.). CHARM performs the energy minimization and molecular dynamics functions. QUANTA performs the construction, graphic modeling and analysis of molecular structure, and allows interactive construction, modification, visualization, and analysis of the behavior of molecules with each other.

[0146] A number of articles review computer modeling of drugs interactive with specific proteins, such as Rotivinen et al., Acta Pharmaceutical Fennica 97:159-166, 1988, Ripka, New Scientist, pp. 54-57, Jun. 16, 1988, McKinaly and Rossmann, Ann. Rev. Pharmacol. Toxiciol. 29:111-122, 1989, Perry and Davies, in “QSAR: Quantitative Structure-Activity Relationships in Drug Design”, pp. 189-193 (Fauchere, ed., Alan R. Liss, Inc., N.Y., 1989), Lewis and Dean, Proc. R. Soc. Lond. 236:125-140 and 141-162, 1989, and, with respect to a model receptor for nucleic acid components, Askew et al., J. Am. Chem. Soc. 111:1082-1090, 1989. Other computer programs that screen and graphically depict chemicals are available from companies such as BioDesign, Inc. (Pasadena, Calif.), Allelix, Inc. (Mississauga, Ontario, Canada), and Hypercube, Inc. (Cambridge, Ontario, Canada). Although primarily designed for application to drugs specific to particular proteins, these can be adapted to the design of drugs specific to regions of DNA or RNA, once that region is identified.

[0147] Although described above with reference to design and generation of compounds that could alter binding, libraries of known compounds, including natural products or synthetic chemicals, and biologically active materials, including proteins, can also be screened for modulating compounds.

### 6.6.1 In Vitro Screening Assays for Compounds that Bind to the Peptides and Proteins of the Current invention

[0148] A number of assays are available to identify compounds that bind to the instant gene products. In general, these assays involve preparing a reaction mixture of one or more of the instant gene products and a test compound under conditions and for a time sufficient to allow the two components to interact and bind, thus forming a complex that can be removed from and/or detected in the reaction mixture. The particular form of the instant gene products used can vary depending upon the goal of the screening assay. For example, where agonists of the natural ligand are sought, the full length gene product, a subunit of the gene product that binds the natural ligand, or a fusion protein containing either of these gene products fused to a protein or polypeptide that affords advantages in the assay system (e.g., labeling, isolation of the resulting complex, etc.) can be utilized.

[0149] These screening assays can be conducted various ways. One method of such an assay involves anchoring the gene product of interest, a fusion protein thereof, or the test compound, onto a solid phase and detecting gene product/test compound complexes anchored on the solid phase at the end of the reaction. In one such method, the gene product of interest may be anchored onto a solid surface, and the test compound, which is not anchored, may be labeled, either directly or indirectly. In another embodiment, the gene product of interest anchored on the solid phase is complexed with its natural ligand, and a test compound assayed for the ability to disrupt the gene product/natural ligand complex.

[0150] Microtiter plates may conveniently be utilized as the solid phase. The anchored component may be immobilized by non-covalent or covalent attachments. Non-covalent attachment may be accomplished by simply coating the solid surface with a solution of the gene product and drying. Alternatively, an immobilized antibody, preferably a monoclonal antibody, specific for the gene product to be immobilized may be used to anchor the gene product to the solid surface. The surfaces may be prepared in advance and stored.

[0151] To conduct such an assay, the nonimmobilized component is added to the coated surface containing the anchored component. After the reaction is complete, unreacted components are removed (e.g., by washing) under conditions such that any complexes formed will remain immobilized on the solid surface. The detection of complexes anchored on the solid surface can be accomplished in a number of ways. When the nonimmobilized component is pre-labeled, the detection of label immobilized on the surface indicates that complexes were formed. When the nonimmobilized component is not pre-labeled, an indirect label can be used to detect complexes anchored on the surface, e.g., using a labeled antibody specific for the previously nonimmobilized component (the antibody may be directly labeled or indirectly labeled with a labeled anti-Ig antibody).

[0152] Alternatively, a reaction can be conducted in a liquid phase. After the reaction, unreacted components are separated from any complexes formed. Complexes can be detected, e.g., using an immobilized antibody specific for one component of the reaction, for example the gene product or test compound, to anchor complexes formed in solution, and a labeled antibody specific for the other component to detect anchored complexes.

[0153] Additionally, a phage display (or other peptide library/binding) system can be used to screen for compounds that bind to one or more of the instant gene products (see, e.g., U.S. Pat. Nos. 5,270,170 and 5,432,018), and peptide arrays comprising a gene product of the present invention can be generated and screened, essentially as described in U.S. Pat. Nos. 5,143,854, 5,405,783, and 5,252,743.

### 6.6.2 Assays for Intracellular Proteins that Interact with the Peptides and Proteins of the Current Invention

[0154] Any method suitable for detecting protein-protein interactions may be employed for identifying intracellular peptides and proteins that interact with the instant gene products. Among the traditional methods that may be employed are co-immunoprecipitation, crosslinking, and co-purification through gradients or chromatographic columns, of cell lysates (or proteins obtained from cell lysates) and the instant gene product of interest to identify proteins in the cell lysate that interact with the instant gene product of interest. In such assays, the instant gene products may be full length, truncated, modified, part of a fusion protein, or a complex of two or more of the instant gene products. Once isolated, such an intracellular protein can be identified using standard techniques, and/or used again in such an assay to identify other intracellular proteins with which it interacts. For example, at least a portion of the amino acid sequence of an intracellular protein that interacts with one or more of the instant gene products can be ascertained using techniques well-known to those of skill in the art, such as Edman degradation (see, e.g., “Proteins: Structures and Molecular Principles”, supra, pp. 34-49). The amino acid sequence obtained may be used as a guide for the generation of oligonucleotide mixtures that can be used to screen for nucleotide sequences encoding such intracellular proteins, for example, using standard hybridization or PCR techniques (see, e.g., “Current Protocols in Molecular Biology”, supra, and “PCR Protocols: A Guide to Methods and Applications” (Innis et al., eds., Academic Press, Inc., N.Y., 1990)).

[0155] Additionally, methods may be employed that result in the simultaneous identification of intracellular proteins, and nucleotide sequences that encode them, that interact with the instant gene products. These methods include, for example, probing expression libraries, in a manner similar to antibody probing of λgt11 libraries, using a labeled form of a gene product of the current invention, or a fusion protein, e.g., a gene product of the invention fused to a marker (e.g., an enzyme, fluor, luminescent protein, or dye) or Ig-Fc domain.

[0156] One method that detects protein interactions in vivo, the two-hybrid system, is described in detail for illustration only, and not by way of limitation. One version of this system has been described (Chien et al., Proc. Natl. Acad. Sci. USA 88:9578-9582, 1991) and is commercially available from Clontech. Briefly, utilizing such a system, plasmids are constructed that encode two hybrid proteins: one plasmid consists of nucleotides encoding the DNA-binding domain of a transcription activator protein fused to a nucleotide sequence encoding a gene product of the current invention; and the other plasmid consists of a nucleotide sequence encoding the activation domain of the transcription activator protein fused to a cDNA encoding an unknown protein to be tested for interaction with the gene product of the present invention, which has been recombined into this plasmid as part of a cDNA library. The DNA-binding domain/instant gene product fusion plasmid and the activation domain/cDNA library plasmids are transformed into a strain of the yeast Saccharomyces cerevisiae that contains a reporter gene (e.g., HBS or lacZ) whose regulatory region contains the binding site for the transcription activator protein. Either hybrid protein alone cannot activate transcription of the reporter gene: the DNA-binding domain hybrid cannot because it does not provide transcription activation function; and the activation domain hybrid cannot because it cannot localize to the binding site of the transcription activator protein. Interaction of the two hybrid proteins reconstitutes a functional transcription activator protein, resulting in reporter gene expression that can be detected by an assay for the reporter gene product.

[0157] For example, and not by way of limitation, a nucleotide sequence encoding a gene product of the present invention can be cloned into a vector such that it is translationally fused to DNA encoding the DNA-binding domain of the GAL4 protein. A cDNA library from the cell line from which proteins that interact with the instant gene product are to be detected can be made using methods routinely practiced in the art. In this particular example, the cDNA library could be made by inserting the cDNA fragments from the cell line into a vector such that they are translationally fused to the transcription activation domain of the GAL4 protein. This library can be co-transformed along with the plasmid encoding the GAL4 DNA-binding domain/instant gene product fusion into a yeast strain that cannot grow without added histidine, and that contains a HIS3 gene driven by a promoter that contains a GAL4 activation sequence. A cDNA encoded protein, fused to the GAL4 transcriptional activation domain, that interacts with the instant gene product/GAL4 DNA binding domain fusion will reconstitute an active GAL4 protein, and thereby drive expression of the HIS3 gene. Colonies that express HIS3 can be detected by their growth on petri dishes containing semi-solid agar based media lacking histidine. The cDNA can then be purified and sequenced from these colonies, and used to produce and isolate the protein that interacts with the gene product of the current invention using standard techniques.

### 6.6.3 Assays for Compounds that Disrupt the Interaction of the Instant Gene Products and Intracelllar Macromolecules

[0158] Macromolecules that interact with the gene products of the current invention are referred to, for purposes of this discussion, as “binding partners”. These binding partners are likely to be involved in catalytic reactions and/or signal transduction pathways, and, thus, in the role of the instant gene products in development and cell differentiation. Compounds that interfere with or disrupt the interaction of such binding partners with the instant gene products may be useful in regulating the activity of the instant gene products, and thus be involved in development and/or cell differentiation disorders.

[0159] Certain assay systems used to identify compounds that interfere with or disrupt the interaction between the instant gene products and its binding partner or partners involve preparing a reaction mixture containing the instant gene product of interest and the binding partner under conditions and for a time sufficient to allow them to interact and bind, thus forming a complex. To test a compound for the ability to interfere with complex formation, a reaction mixture is prepared in the presence of the test compound, and a control reaction mixture is prepared in the absence of the test compound, or with a placebo. The test compound may be initially included in the reaction mixture, or added to the reaction mixture after addition of the gene product of interest and its binding partner. The formation of a complex between the instant gene product of interest and the binding partner is then detected. Formation of a complex in the control reaction, but not in the reaction mixture containing the test compound, indicates that the compound interferes with the interaction of the instant gene product of interest and the binding partner. Additionally, complex formation in reaction mixtures containing a test compound and a normal gene product of the current invention can be compared to complex formation in reaction mixtures containing the test compound and a mutant gene product of the current invention, which may be important when it is desirable to identify compounds that disrupt interactions of mutant, but not normal, forms of a gene product of the current invention.

[0160] Assays for compounds that interfere with the interaction of a gene product of the current invention and its binding partner(s) can be conducted in a number of ways, including, but not limited to, heterogeneous or homogeneous formats. Heterogeneous assays can involve anchoring either the instant gene product of interest or the binding partner onto a solid phase, and detecting complexes anchored on the solid phase at the end of the reaction, or the entire reaction can be carried out in a liquid phase. In homogeneous assays, the entire reaction is carried out in a liquid phase. Heterogeneous assay formats are detailed above in Section 6.6.1.

[0161] In either approach, the order of addition of reactants can be varied to obtain different information about the compounds being tested. For example, test compounds that interfere with the interaction by competition can be identified by conducting the reaction in the presence of the test substance, i.e., adding the test substance to the reaction mixture prior to or simultaneously with the instant gene product of interest and the binding partner, while test compounds that disrupt preformed complexes, e.g., compounds with higher binding constants that displace one of the components from the complex, can be tested by adding the test compound to the reaction mixture after complex formation.

[0162] In homogeneous assays, a preformed complex of the instant gene product of interest and the binding partner is prepared in which one of these components is labeled, but the signal generated by the label is quenched due to formation of the complex (see, e.g., U.S. Pat. No. 4,190,496, which utilizes this approach for immunoassays). The addition of a test compound that competes with and displaces one component from the preformed complex will result in the generation of a signal above background. In this way, a test compound that disrupts the interaction between the instant gene product of interest and the binding partner can be identified.

[0163] In a particular embodiment, a gene product of the current invention can be prepared for immobilization by fusing it to a glutathione-S-transferase (GST), using a fusion vector such as pGEX-5×-1, such that the binding activity of the gene product of the present invention is maintained in the resulting GST fusion protein. The binding partner can be purified and used to raise a monoclonal antibody, using standard methods as described herein, which can be labeled with a radioactive isotope, for example ¹²⁵I, using standard methods routinely practiced in the art. In a heterogeneous assay, the GST fusion protein can be anchored to glutathione-agarose beads. The binding partner can then be added in the presence or absence of a test compound in a manner that allows interaction and binding to occur. At the end of the reaction, unbound material can be washed away, and the labeled monoclonal antibody added and allowed to bind complexed components. The interaction between the instant gene product of interest and the binding partner can be detected by measuring the amount of radioactivity remaining with the glutathione-agarose beads. Successful inhibition of the interaction by the test compound will result in a decrease in measured radioactivity.

[0164] Alternatively, the GST fusion protein and the binding partner can be mixed together in a liquid phase in the absence of the solid glutathione-agarose beads. The test compound can be added either during or after the components are allowed to interact. This mixture can then be added to the glutathione-agarose beads, and unbound material washed away. Once again, the extent of inhibition of complex formation can be detected by adding the labeled antibody, and measuring the amount of radioactivity remaining with the glutathione-agarose beads.

[0165] These same techniques can also be employed using peptide fragments corresponding to the binding domains of a gene product of the current invention and/or the binding partner (in cases where the binding partner is a protein), in place of one or both of the full-length proteins. A number of methods routinely practiced in the art can be used to identify and isolate the binding domain(s). These methods include, but are not limited to, mutagenesis of a nucleotide sequence encoding one of the components, and screening for disruption of binding in a co-immunoprecipitation assay. Compensating mutations in the sequence encoding the second component in the complex can then be selected. Sequence analysis of the respective coding sequences will reveal the region of the proteins that contain the mutation(s), and are thus the regions of the proteins involved in interactive binding. Alternatively, one protein can be anchored to a solid surface and allowed to interact with and bind to the binding partner, which has been labeled and treated with a proteolytic enzyme, such as trypsin. After washing, a labeled peptide comprising the binding domain may remain associated with the solid material, which can be isolated and identified by amino acid sequencing. Also, once the nucleotide sequence encoding the binding partner is obtained, short nucleotide segments can be engineered to express peptide fragments of the protein, which can be tested for binding activity, and then purified and/or synthesized.

[0166] For example, and not by way of limitation, a peptide or protein of the current invention can be anchored to a solid material by making a GST fusion protein, as described above, and allowing it to bind to glutathione-agarose beads. The binding partner can be labeled with a radioactive isotope, such as ³⁵S, and cleaved with a proteolytic enzyme, such as trypsin. Cleavage products can then be added to the anchored GST fusion protein and allowed to bind. After washing away unbound peptides, labeled bound material, representing the binding domain of the binding partner, can be eluted and purified. The amino acid sequence of the binding domain can be determined using well-known methods, and subsequently produced synthetically, or fused to appropriate facilitative proteins using recombinant DNA technology.

### 6.6.4 Assays for Compounds that Ameliorate Development and/or Cell Differentiation Disorders

[0167] Compounds, including, but are not limited to, binding compounds identified via assay techniques such as those described above, can be tested for the ability to ameliorate development and/or cell differentiation disorder symptoms. The invention encompasses cell-based and animal model-based assays for identification of such compounds. Such compounds can be used in a therapeutic method for the treatment of developmental and/or cell differentiation disorders.

[0168] Cell-based systems can be used to identify compounds that ameliorate developmental and/or cell differentiation disorder symptoms. Such cell-based systems can include, for example, recombinant or non-recombinant cells, such as cell lines, that express a nucleotide sequence encoding the gene product of interest of the current invention. For example, ES cells, or cell lines derived from ES cells, can be used. In addition, host cells (e.g., fibroblasts, or COS, CHO, or Sf9 cells) genetically engineered to express a functional gene product of the current invention, in addition to factors necessary for the instant gene product to carry out its physiological role, for example signal transduction or catalysis, can be used as an end point in the assay. Such cell-based assay systems can also be used to assay the purity and potency of a natural ligand, or a catalytic subunit or catalytic subunit mutant, including recombinant or synthetic catalytic subunits.

[0169] In such cell-based systems, cells may be exposed to a test compound at a concentration and for a time sufficient to ameliorate developmental and/or cell differentiation disorder symptoms in the exposed cells. After exposure, the cells can be examined to determine whether one or more developmental or cell differentiation disorder-like cellular phenotype has been altered to resemble a more normal or wild-type phenotype, or a phenotype more likely to produce a lower incidence or severity of disorder symptoms. Compounds that elicit such an effect are valuable candidates as therapeutics. The cells can also be assayed to measure alterations in the expression of the instant gene product of interest of the current invention, e.g., by assaying cell lysates for the appropriate mRNA transcripts (e.g., by Northern analysis), or alterations in the activity of the gene product of interest of the current invention in the cell. Alternatively, a change in morphology, or alterations in the expression and/or activity of components of pathways or functions that involve the instant gene product of interest, can be assayed in such cells.

[0170] In addition, animal-based systems, which may include, for example, mice, may be used to identify compounds capable of ameliorating development and/or cell differentiation disorder symptoms. For example, animals may be exposed to a test compound at a concentration and for a time sufficient to ameliorate developmental and/or cell differentiation disorder symptoms in the exposed animals. After exposure, the animals can be examined to determine whether one or more developmental and/or cell differentiation disorder-like phenotype has been altered to resemble a more normal or wild-type phenotype, a phenotype more likely to produce a lower incidence or severity of disorder symptoms, or reversal of disorder symptoms. Once again, compounds that elicit such an effect are valuable candidates as therapeutics. Such animal models may thus be used as test systems for the identification therapies and interventions that may be effective in treating developmental and/or cell differentiation disorders. Any compound that reverses any aspect of development and/or cell differentiation disorder-like symptoms should be considered a candidate for human developmental and/or cell differentiation disorder therapeutic intervention. Dosages of such compounds may be determined using dose-response curves, as discussed below.

### 6.7 Treatment of Development and Cell Differentiation Disorders

[0171] The invention also encompasses methods and compositions for modifying development and/or cell differentiation, and thus treating development and cell differentiation disorders. For example, the level of expression of one or more of the instant gene products can be decreased, and/or the activity of one or more of the instant gene products can be downregulated. Thus, the response of cells, for example ES cells, to factors that activate the physiological responses that enhance the pathological processes leading to developmental and/or cell differentiation disorders may be reduced, and the symptoms ameliorated. Conversely, the response of cells, for example ES cells, to physiological stimuli involving any of the instant gene products and necessary for proper developmental and/or cell differentiation processes may be augmented by increasing the expression and/or activity of one or more of the instant gene products.

### 6.7.1 Inhibition of the Instant Gene Products to Reduce Development and Cell Differentiation Disorder Systems

[0172] Any method that neutralizes the catalytic and/or signal transduction activity of the instant gene products, or that inhibits expression of sequences encoding the instant gene products (either transcription or translation), can be used to reduce development and cell differentiation disorder symptoms.

[0173] For example, immunotherapy can be designed to reduce the level of endogenous expression of the instant gene products, e.g., using antisense or ribozyme approaches to inhibit or prevent translation of mRNA, triple helix approaches to inhibit transcription, or targeted homologous recombination to inactivate the coding sequence or its endogenous promoter.

[0174] Antisense approaches involve oligonucleotides (either DNA or RNA) that are complementary to mRNA specific for the instant gene product of interest. The oligonucleotides will bind to the complementary mRNA transcripts, and prevent translation. Absolute complementarity, although preferred, is not required. A sequence “complementary” to a portion of an RNA, as referred to herein, means a sequence having sufficient complementarity to be able to hybridize with the RNA, forming a stable duplex. In double-stranded antisense nucleic acids, a single strand of the duplex DNA may be tested, or triplex formation may be assayed. The ability to hybridize will depend on both the degree of complementarity and the length of the antisense nucleic acid. Generally, the longer the hybridizing nucleic acid, the more base mismatches with an RNA it may contain and still form a stable duplex (or triplex, as the case may be). One skilled in the art can ascertain a tolerable degree of mismatch by use of standard procedures to determine the melting point of the hybridized complex.

[0175] Oligonucleotides that are complementary to the 5′ end of the message, e.g., the 5′ untranslated region (UTR) up to and including the AUG initiation codon, generally are the most efficient in inhibiting translation. Such oligonucleotides should generally include the complement of the AUG start codon. However, sequences complementary to 3′ untranslated sequence have also been shown to be effective in inhibiting translation (see, e.g., Wagner, Nature 372:333-335, 1994). Furthermore, although oligonucleotides complementary to coding regions are usually less efficient in inhibiting translation, these can also be used in accordance with the invention. The antisense nucleic acids should generally be from at least 6 to about 50 nucleotides in length, while in certain embodiments the antisense nucleic acid is at least 10, at least 17, at least 25, or at least 50 nucleotides in length.

[0176] In general, in vitro studies are performed to quantitate the ability of the antisense oligonucleotide to inhibit gene expression, utilizing controls that can distinguish between antisense gene inhibition and nonspecific biological effects of the oligonucleotide. Usually these studies compare levels of the target RNA or protein to an internal control RNA or protein, and the results obtained with the antisense oligonucleotide are compared to those obtained with a control oligonucleotide. The control oligonucleotide should be about the same length as the antisense oligonucleotide, and differ in sequence from the antisense oligonucleotide just enough to prevent specific hybridization to the target sequence.

[0177] Antisense oligonucleotides can be DNA or RNA, or chimeric mixtures, derivatives, or modified versions thereof, and be single-stranded or double-stranded. The oligonucleotide can be modified at the base moiety, sugar moiety, or phosphate backbone, for example to improve stability of the molecule or hybridization. The oligonucleotide may be conjugated to other groups, such as peptides (e.g., to target host cell receptors in vivo), agents facilitating transport across cell membranes (see, e.g., Letsinger et al., Proc. Natl. Acad. Sci. USA 86:6553-6556, 1989, Lemaitre et al., Proc. Natl. Acad. Sci. USA 84:648-652, 1987, and PCT Application No. WO 88/09810), hybridization-triggered cleavage agents (see, e.g., Krol et al., BioTechniques 6:958-976, 1988), and intercalating agents (see, e.g., Zon, Pharm. Res. 5:539-549, 1988).

[0178] The antisense oligonucleotide may comprise at least one modified base moiety, including, but are not limited to, 5-fluorouracil, 5-bromouracil, 5-chlorouracil, 5-iodouracil, hypoxanthine, xanthine, 4-acetylcytosine, 5-(carboxyhydroxylmethyl)uracil, 5-carboxymethylaminomethyl-2-thiouridine, 5-carboxymethylaminomethyluracil, dihydrouracil, N6-adenine, β-D-galactosylqueosine, N6-isopentenyladenine, wybutoxosine, 1-methylguanine, 1-methylinosine, 2,2-dimethylguanine, uracil-5-oxyacetic acid, 2-methyladenine, 2-methylguanine, queosine, β-D-mannosylqueosine, pseudouracil, 3-methylcytosine, uracil-5-oxyacetic acid methylester, 5-methylcytosine, 2-thiouracil, 5-methoxyuracil, 7-methylguanine, 5-methylaminomethyluracil, 5-methoxyaminomethyl-2-thiouracil, 5-methyluracil, inosine, 5′-methoxycarboxymethyluracil, 2-thiocytosine, 4-thiouracil, 5-methyl-2-thiouracil, 2-methylthio-N6-isopentenyladenine, pseudouracil, 3-(3-amino-3-N-2-carboxy propyl)uracil, and 2,6-diaminopurine.

[0179] The antisense oligonucleotide may comprise at least one modified sugar moiety, including, but not limited to, hexose, arabinose, 2-fluoroarabinose, and xylulose. The antisense oligonucleotide may comprise at least one modified phosphate backbone, such as phosphorothioate, phosphoramidate, alkyl phosphotriester, phosphorodithioate, phosphoramidothioate, phosphordiamidate, methylphosphonate, formacetal, or analog thereof. Additionally, the antisense oligonucleotide may be an alpha-anomeric oligonucleotide, which forms specific double-stranded hybrids with complementary RNA in which, contrary to the usual alpha-units, the strands run parallel to each other (Gautier et al., Nucl. Acids Res. 15:6625-6641, 1987), 2′-0-methylribonucleotide (Inoue et al., Nucl. Acids Res. 15:6131-6148, 1987), or a chimeric RNA-DNA analogue (Inoue et al., FEBS Lett. 215:327-330, 1987).

[0180] Oligonucleotides may be synthesized by standard methods known in the art, e.g., by use of an automated DNA synthesizer (commercially available from Biosearch Technologies, Inc. (Novato, Calif.), Applied Biosystems, etc.). For example, methods for preparing phosphorothioate (Stein et al., Nucl. Acids Res. 16:3209-3221, 1988), or methylphosphonate (using controlled pore glass polymer supports; Sarin et al., Proc. Natl. Acad. Sci. USA 85:7448-7451, 1988) oligonucleotides may be used.

[0181] The antisense oligonucleotides should be delivered to cells that express the instant gene products in vivo, for example ES cells. A number of methods have been developed for delivering antisense DNA or RNA to cells, including, but not limited to, direct injection of antisense oligonucleotides into the tissue or cell derivation site (e.g., bone marrow), and systemic administration of antisense oligonucleotides that are modified to target a desired cell (e.g., oligonucleotides linked to peptides or antibodies that specifically bind to receptors or antigens expressed on the target cell surface).

[0182] One approach for achieving intracellular concentrations of an antisense oligonucleotide that is sufficient to suppress translation of endogenous mRNAs utilizes a recombinant DNA construct in which the antisense oligonucleotide is placed under the control of a strong pol III or pol II promoter. Such a vector can be introduced in vivo and taken up by a cell that directs the transcription of an antisense RNA. Such a vector can remain episomal, or integrate into a chromosome, as long as it can be transcribed to produce the desired antisense RNA, and can be constructed using standard recombinant DNA techniques. Vectors for use in replication and expression in mammalian cells can be derived from plasmid, viral, cosmid, YAC, or other sources known in the art.

[0183] Any promoter, either inducible or constitutive, known to work in mammalian, preferably human, cells can be used to express the sequence encoding the antisense RNA. Such promoters include, but are not limited to, the SV40 early promoter region (Benoist and Chambon, Nature 290:304-310, 1981), the promoter contained in the 3′ long terminal repeat of Rous sarcoma virus (Yamamoto et al., Cell 22:787-797, 1980), the herpes thymidine kinase promoter (Wagner et al., Proc. Natl. Acad. Sci. USA 78:1441-1445, 1981), and the regulatory sequences of the metallothionein gene (Brinster et al., Nature 296:39-42, 1982). The recombinant DNA construct can be introduced directly into the tissue or cell derivation site. Alternatively, viral vectors can be used that selectively infect the desired tissue or cell-type (e.g., viruses that infect cells of hematopoietic lineage), and thus administered by another route (e.g., systemically).

[0184] Ribozyme molecules designed to catalytically cleave mRNA transcripts specific for a gene product of the current invention can also be used to prevent translation of the mRNA, or expression of the gene product encoded by the mRNA (see, e.g., PCT Application No. WO 90/11364, and Sarver et al., Science 247:1222-1225, 1990). Ribozymes that cleave mRNA at site specific recognition sequences, as well as hammerhead ribozymes, can be used to destroy the target mRNA. Hammerhead ribozymes cleave mRNA at a location dictated by flanking regions that form complementary base pairs with the target mRNA (see, e.g., Haseloff and Gerlach, Nature 334:585-591, 1988). The sole requirement is that the target mRNA have a 5′-UG-3′ sequence. The ribozyme can be engineered so that the cleavage recognition site is located near the 5′ end of the target mRNA, i.e., to increase efficiency and minimize the intracellular accumulation of non-functional mRNA transcripts.

[0185] The ribozymes of the present invention also include RNA endoribonucleases (hereinafter “Cech-type ribozymes”), such as the one that occurs naturally in Tetrahymena thermophila (known as the IVS, or L-19 IVS RNA; see, e.g., Zaug et al., Science 224:574-578, 1984, Zaug and Cech, Science 231:470-475, 1986, Zaug et al., Nature 324:429-433, 1986, Been and Cech, Cell 47:207-216, 1986, and PCT Application No. WO 88/04300). The Cech-type ribozymes have an eight base pair active site that hybridizes to a target RNA sequence, whereupon cleavage of the target RNA takes place. The invention encompasses Cech-type ribozymes that target eight base-pair active site sequences present in mRNA specific for a gene product of interest of the current invention.

[0186] As detailed above for antisense oligonucleotides, the ribozymes can comprise modified oligonucleotides (e.g., for improved stability, targeting, etc.), and should be delivered to cells that express the instant gene product of interest in vivo, for example ES cells. A preferred method of delivery involves using a DNA construct “encoding” the ribozyme under the control of a strong constitutive pol III or pol II promoter, as detailed above for antisense oligonucleotides. Because ribozymes, unlike antisense molecules, are catalytic, lower intracellular concentrations are required.

[0187] Endogenous expression of a gene of interest can also be reduced by targeting deoxyribonucleotide sequences that are complementary to the regulatory region of the gene (i.e., the promoter and/or enhancers), to form triple helical structures that prevent transcription of the gene of interest in target cells in the body (see, e.g., Helene, Anticancer Drug Des. 6:569-584, 1991, Helene et al., Ann. N.Y. Acad. Sci. 660:27-36, 1992, and Maher, Bioassays 14:807-815, 1992).

[0188] Endogenous gene expression can also be reduced by inactivating, or “knocking out”, a nucleotide encoding a gene product of the present invention, or its promoter, using targeted homologous recombination (see, e.g., Smithies et al., Nature 317:230-234, 1985, Thomas and Capecchi, Cell 51:503-512, 1987, and Thompson et al., supra). For example, a sequence encoding a mutant, non-functional gene product of interest of the current invention, or a completely unrelated DNA sequence, flanked by DNA homologous to the endogenous gene encoding the gene product of interest of the current invention (either the coding region or regulatory regions of the gene) can be used, with or without a selectable marker and/or a negative selectable marker, to transfect cells that express the instant gene product of interest in vivo. Insertion of the DNA construct into the endogenous gene, via targeted homologous recombination, results in inactivation of the targeted endogenous gene. While modifications to ES cells can be used to generate animal offspring with an inactive copy of a gene encoding a gene product of interest of the current invention (see, e.g., Thomas and Capecchi, supra, and Thompson et al., supra), this approach can be adapted for use in humans using appropriate viral vectors that are directly administered, or targeted to the desired site in vivo.

[0189] Additionally, the activity of an instant gene product of interest can be reduced using a “dominant negative” approach. A dominant negative approach takes advantage of the interaction of an instant gene product of interest with other peptides or proteins to form a complex that is a prerequisite for the instant gene product of interest to exert its physiological activity. To this end, constructs that encode a defective form of the instant gene product of interest can be used in gene therapy approaches to diminish the activity of the instant gene product of interest in appropriate target cells. Alternatively, targeted homologous recombination can be used to introduce a sequence encoding a defective form of the instant gene product of interest into the endogenous gene encoding the instant gene product of interest in one or more desired tissue(s). The engineered cells will express non-functional copies of the instant gene product of interest, thereby downregulating its activity in vivo. Such engineered cells can demonstrate a diminished response to physiological stimuli of the activity of the affected instant gene product of interest, resulting in reduction of a developmental and/or cell differentiation disorder phenotype.

### 6.7.2 Increasing the Expression or Activity of the Instant Gene Products to Promote Development or Cell Differentiation

[0190] With respect to an increase in the level of normal gene expression and/or gene product activity specific for any of the gene products of interest of the current invention, the respective nucleic acid sequences can be utilized for the treatment of development and cell differentiation disorders. Where the cause of the development or cell differentiation dysfunction is a defective gene product of the current invention, treatment can be administered, for example, in the form of gene delivery or gene therapy. Specifically, one or more copies of a normal nucleic acid sequence, or fragment thereof, that directs production of a gene product exhibiting normal function of the appropriate gene product of the current invention, may be inserted into the appropriate cells within a patient or animal subject, for example using suitable vectors.

[0191] Recombinant retroviruses have been widely used in gene transfer or gene delivery experiments, and even human clinical trials (see, e.g., Mulligan, in “Experimental Manipulation of Gene Expression”, Chapter 8, pp. 155-173 (Inouye, ed., Academic Press, N.Y., 1983), and Coffin, in “RNA Tumor Viruses”, Vol. 2, pp. 36-38 (Weiss et al., eds., Cold Spring Harbor Press, Cold Spring Harbor, N.Y., 1985)). Other eucaryotic viruses that have been used as vectors to transduce mammalian cells include, but are not limited to, adenovirus, papilloma virus, herpes virus, adeno-associated virus, vaccinia virus, and rabies virus (see, e.g., “Molecular Cloning: A Laboratory Manual”, Vol. 3, Chapter 16, supra).

[0192] Alternatively, cationic or other lipids may be employed to deliver polynucleotides encoding the instant gene product of interest to patients. Additionally, “naked” DNA comprising one or more polynucleotides encoding the instant gene products of interest, optionally operably linked to one or more of a promoter, an enhancer, a ribosome entry or ribosome binding site, and/or an in-frame translation initiation codon, can be used for delivery to a patient. Such “naked” DNA vaccines can be delivered in vivo alone, or in conjunction with excipients, microcarrier spheres, nanoparticles, or other supporting or dosaging compounds or molecules.

[0193] The described gene replacement/delivery therapies should be capable of delivering polynucleotides to cell-types within patients that express the gene product of interest of the current invention. Targeted homologous recombination, as described above, can also be utilized to correct a defective endogenous gene in the appropriate cell-type. In animals, targeted homologous recombination can be used to correct a defect in ES cells, to produce progeny with a corrected trait.

[0194] Finally, compounds identified in the assays described herein that stimulate, enhance, or modify the activity of the gene product of interest of the current invention can be used to correct or ameliorate development and cell differentiation disorders. The formulation and mode of administration will depend upon the physico-chemical properties of the compound.

### 6.8 Pharmaceutical Compositions and Methods of Administration

[0195] Compositions that affect expression or activity of the gene products of the current invention, or the interaction of the gene products of the present invention with any of their binding partners, or that comprise one or more nucleotide sequences encoding a gene product of the present invention (i.e., sequences used in antisense, gene therapy, dsRNA, or ribozyme applications), can be administered to a patient at therapeutically effective doses to treat or ameliorate development and/or cell differentiation disorders. A therapeutically effective dose refers to an amount of the compound or composition that results in any amelioration or retardation of development, cell differentiation and/or proliferation disorders or disease symptoms.

### 6.8.1 Effective Dose

[0196] Toxicity and therapeutic efficacy of such compositions can be determined by standard pharmaceutical procedures in cell cultures or experimental animals, e.g., for determining the LD₅₀ (the dose lethal to 50% of the population) and the ED₅₀ (the dose therapeutically effective in 50% of the population). The dose ratio between toxic and therapeutic effects is the therapeutic index, which can be expressed as the ratio LD₅₀/ED₅₀. Compositions exhibiting large therapeutic indices are preferred. While compositions that exhibit toxic side effects may be used, care should be taken to design a delivery system that targets such compositions to the site of affected tissue, in order to minimize potential damage to uninfected cells and, thereby, reduce side effects.

[0197] The data obtained from the cell culture assays and animal studies can be used in formulating a dosage range for use in humans. The dosage of such compositions lies preferably within a range of circulating concentrations that include the ED₅₀ with little or no toxicity. The dosage may vary within this range depending upon the dosage form employed and the route of administration utilized. For any compositions used in such treatment methods, the therapeutically effective dose can be estimated initially from cell culture assays. A dose may be formulated in animal models to achieve a circulating plasma concentration range that includes the IC₅₀ (i.e., the concentration of the test compound that achieves a half-maximal inhibition of symptoms) as determined in cell culture. Such information can be used to more accurately determine useful doses in humans. Levels in plasma may be measured, for example, by high performance liquid chromatography.

[0198] The appropriate dosage may also be determined using animal studies to determine the maximal tolerable dose, or MTD, of a bioactive agent per kilogram weight of the test subject. In general, at least one animal species tested is mammalian. Those skilled in the art regularly extrapolate doses for efficacy and avoiding toxicity to other species, including human. Before human efficacy studies begin, Phase I clinical studies in normal subjects help establish safe doses.

[0199] The bioactive agent may be complexed with a variety of compounds or structures known in the art that, for instance, enhance the stability of the bioactive agent, or otherwise enhance its pharmacological properties (e.g., increase in vivo half-life, reduce toxicity, etc.). The therapeutic agents can be administered by any number of methods known to the skilled artisan, including, but not limited to: subcutaneous (sub-q), intravenous (I.V.), intraperitoneal (I.P.), intramuscular (I.M.), or intrathecal injection; inhalation; or topically (transderm, ointments, creams, salves, eye drops, etc.).

### 6.8.2 Formulations and Use

[0200] Pharmaceutical compositions for use in the present invention may be formulated in a conventional manner using one or more physiologically acceptable carriers or excipients. The compositions, or their physiologically acceptable salts or solvates, may be formulated for administration by any route, such as inhalation or insufflation (either through the mouth or nose), oral, buccal, parenteral, or rectal administration.

[0201] For administration by inhalation, the compositions are conveniently delivered in the form of an aerosol spray from pressurized packs or a nebulizer, with the use of a suitable propellant, e.g., dichlorodifluoromethane, carbon dioxide, trichlorofluoromethane, dichlorotetrafluoroethane, or other suitable gas. In the case of a pressurized aerosol the dosage unit may be determined by providing a valve to deliver a metered amount. Capsules and cartridges for use in an inhaler or insufflator may be formulated with a powder mix of the compound and a suitable powder base such as lactose or starch.

[0202] For oral administration, the compositions can take the form of tablets or capsules with pharmaceutically acceptable excipients, such as binding agents (e.g., pregelatinized maize starch, polyvinylpyrrolidone, hydroxypropyl methylcellulose); fillers (e.g., lactose, microcrystalline cellulose, or calcium hydrogen phosphate); lubricants (e.g., magnesium stearate, talc, or silica); disintegrants (e.g., potato starch or sodium starch glycolate); or wetting agents (e.g., sodium lauryl sulphate). The tablets may be coated by methods well-known in the art. Liquid preparations for oral administration may take the form of solutions, syrups, or suspensions, or they may be presented as a dry product for constitution with water or other suitable vehicle before use. Such liquid preparations may comprise pharmaceutically acceptable additives, such as suspending agents (e.g., sorbitol syrup, cellulose derivatives or hydrogenated edible fats); emulsifying agents (e.g., acacia or lecithin); non-aqueous vehicles (e.g., almond oil, oily esters, ethyl alcohol, or fractionated vegetable oils); or preservatives (e.g., methyl or propyl-p-hydroxybenzoates or sorbic acid). The preparations may also contain buffer salts, flavoring, coloring and sweetening agents as appropriate. Preparations for oral administration may be formulated to give controlled release of the active compound.

[0203] For buccal administration the compositions may take the form of tablets or lozenges formulated in conventional manner.

[0204] For parenteral administration, the compositions may be formulated for injection, e.g., by bolus injection or continuous infusion. Such formulations may be presented in unit dosage form, e.g., in ampules or multi-dose containers, with an added preservative. The compositions may take such forms as suspensions, solutions, or emulsions in oily or aqueous vehicles, and may contain formulatory agents such as suspending, stabilizing and/or dispersing agents. The active ingredient may also be in powder form for constitution with a suitable vehicle, like sterile pyrogen-free water, before use.

[0205] For rectal administration, compositions may be formulated as suppositories or retention enemas, e.g., containing suppository bases such as cocoa butter or other glycerides.

[0206] The pharmaceutical compositions may also be formulated as a depot preparation. Such long acting formulations may be administered by implantation (e.g., sub-q or I.M.), or by intramuscular injection. The compositions may be formulated with suitable polymeric or hydrophobic materials (for example as an emulsion in an acceptable oil),ion exchange resins, or as sparingly soluble derivatives, for example, as a sparingly soluble salt. The compositions may be presented in a pack or dispenser device that contains one or more unit dosage forms containing the active ingredient. The pack may comprise metal or plastic foil, like a blister pack. The pack or dispenser device may be accompanied by instructions for administration.

### 6.9. Analysis of the Human Genome Using GTS Sequences

[0207] The Human Genome Project and privately financed ventures have provided the world with a copy of the sequence of each human chromosome. However, the overwhelming majority of this genomic sequence information does not encode proteins, and the portion that does encode proteins is generally dispersed as exons amidst large regions of intervening intronic sequence. Thus, to effectively make genomic sequence information useful, identification of the coding regions, splice junctions, and chromosomal location will generally be necessary.

[0208] Within any cell in the human body there are estimated to be 10,000-20,000 different genes that are actually expressed among a estimated 50,000-125,000 total genes. Within this group, there are genes that are abundantly expressed, such as “house-keeping” genes, those that are moderately expressed, and those that are rarely expressed. Rarely expressed genes are often those that attract the most scientific interest in relation to disease, development, and cell cycle processes. The majority of key proteins in these processes, many of which encode enzymes, are either rarely expressed, or expressed in a tightly controlled fashion. ESTs have been used for identifying coding regions in the human genome, but because of the techniques used for identifying ESTs, the majority of genes that have been so identified are those that are abundantly expressed in the cell. In addition, there has been a huge overlap in identification of those genes at the higher end of the expression curve. Thus, about 30-40% of human genes are still undiscovered, and identification of rarely expressed sequences is a major scientific goal.

[0209] The gene trap technology described herein allows for the identification of such rarely expressed sequences. Because the this technology does not rely on endogenous promoters, there is an essentially equal chance of isolating a sequence that is rarely expressed in the cell as a sequence that is highly expressed in the cell. Accordingly, a key advantage of gene trapping is that it allows for the identification and isolation of rarely expressed sequences in a fraction of the time necessary to isolate such sequences previously. For example, of the first 20,000 human genes identified by gene trapping, approximately 10,000 were not present in published gene sequence databases. Therefore, SEQ ID NOS:10-5,504 comprise a significant number of rarely expressed sequences, and allow the study of key elements of cellular processes, as well as the best targets for therapeutic intervention.

[0210] To identify a sequence as “rarely expressed”, expression patterns in a variety of tissues, cell lines, and cancer cells can be determined using techniques known to one of skill in the art, including Northern blot technology, Quantitative PCR, and others. Obtaining a weak or nonexistent signal in the majority of cases suggests the sequence is “rarely expressed”. A GTS corresponding to such a sequence would be particularly useful in gene chip or comparable hybridization technology.

[0211] The GTSs described herein also do not display the 3′ bias typical of EST sequences obtained by conventional methods, and are thus more likely to provide information from the coding region of genes as opposed to 3′ (or 5′) untranslated regions.

[0212] When the GTSs of SEQ ID NOS:10-5,504 are overlaid onto the map of the human genome, a variety of information can be obtained, including, for example, coding regions (exons), splice junctions, and chromosomal locations. To analyze the described GTSs, or overlay them on human genomic sequence, a computer-based system including a search program for accessing a human genome database can be used. The sequence from any of SEQ ID NOS:10-5,504 is compared and aligned to the human genome, allowing for gaps. Where homologous genomic sequence is found, a given GTS typically identifies several dispersed regions of homology, and the intervening gaps will generally constitute introns. Thus, the GTSs can be used to identify the specific locations of exon splice junctions, which can be particularly important in the study of disease and cancer, since splice junctions are often hot spots for erroneous events leading to these disease states.

[0213] The GTSs can be used to identify the chromosomal location of a coding region (or an experimentally determined location confirmed), by layering or aligning the GTSs with human genomic sequence, as discussed above, or a specific location on a chromosome can be “searched” for the correct sequence. The chromosomal location is an important piece of information when looking for those regions of the human genome involved in genetic diseases, cancer, and predispositions to various disease states. Chromosomal translocations have been found to be associated with a number of disease states, and often it is possible to locate a gross chromosome position for a disease-associated gene. Thus, this information will help to pinpoint the exact location of a potentially disease-associated gene.

### 6.10 Computer Related Embodiments

[0214] The GTSs of SEQ ID NOS:10-5,504, fragments thereof, or nucleotide sequences at least 99% identical thereto, can be “provided” in a variety of media to facilitate use. As used herein, “provided” refers to a manufacture, other than an isolated nucleic acid molecule, that contains a nucleotide sequence of the present invention, as set forth herein. Such a manufacture provides the human genome, or subset thereof (e.g., a human ORF), in a form that allows a skilled artisan to examine the manufacture using means not directly applicable to the human genome as it exists in nature or purified form.

[0215] In one embodiment, a nucleotide sequence of the present invention can be recorded on computer readable media. As used herein, “computer readable media” refers to any medium that can be read and accessed directly by a computer. Such media include, but are not limited to: magnetic storage media, such as floppy discs, hard disc storage medium, and magnetic tape; optical storage media such as CD-ROM; electrical storage media such as RAM and ROM; and hybrids of these categories such as magnetic/optical storage media. The choice of the medium will generally be based on the means chosen to access the stored information. As used herein, “recorded” refers to any process for storing information on computer readable media. The skilled artisan can generate a manufacture comprising computer readable media recorded thereon a nucleotide sequence of the present invention, using well-known materials and techniques.

[0216] A variety of data processing programs and formats can be used to store the instant nucleotide sequence information on computer readable media. The information can be represented in a word processing text file, formatted in commercially-available software, such as WordPerfect or MicroSoft Word, represented in the form of an ASCII file, stored in a database application, such as DB2, Sybase, Oracle, or the like. The skilled artisan can readily adapt any number of data processor structuring formats (e.g., text file or database) to obtain computer readable media having recorded thereon the nucleotide sequence information of the present invention.

[0217] By providing the nucleotide sequence of the present invention in computer readable form, a skilled artisan can routinely access the sequence information for a variety of purposes. Computer software is publicly available that allows a skilled artisan to access sequence information provided in a computer readable medium. Software that implements the BLAST (Altschul et al., J. Mol. Biol. 215:403-410, 1990) or BLAZE (Brutlag et al., Comp. Chem. 17:203-207, 1993) search algorithm on a Sybase system can be used to identify ORFs in the Homo sapiens genome that contain homology to ORFs or proteins from other organisms. Such ORFs can be useful in producing commercially important metabolites or proteins, such as enzymes used in fermentation reactions.

[0218] The present invention also provides systems, particularly computer-based systems, that contain the sequence information described herein. Such systems are designed to identify commercially important fragments of the Homo sapiens genome. As used herein, a “computer-based system” refers to the hardware means, software means, and data storage means used to analyze the instant nucleotide sequence information. Minimum hardware means of such a computer-based system comprises a central process unit (CPU), input means, output means, and data storage means. As used herein, “data storage means” refers to memory that can store the instant nucleotide sequence information, or a memory access means that can access manufactures having recorded thereon the instant nucleotide sequence information. The skilled artisan readily appreciates that any one of the currently available computer-based systems are suitable for use in the present invention.

[0219] The instant computer-based systems also comprise the necessary hardware means and software means for supporting and implementing a search means. As used herein, “search means” refers to one or more programs that are implemented on the computer-based system to compare a target sequence with the sequence information stored within the data storage means. Search means are used to identify fragments or regions of the Homo sapiens genome that match a particular target sequence. A variety of commercially available software for conducting search means can be used in the computer-based systems of the present invention, including, but not limited to, MacPattern (EMBL), BLASTN and BLASTX (NCBIA). The skilled artisan can recognize that any available algorithms or implementing software packages for conducting homology searches can be adapted for use in the present computer-based systems.

[0220] As used herein, a “target sequence” can be any nucleic or amino acid sequence of six or more nucleotides or two or more amino acids. A skilled artisan can readily recognize that the longer a target sequence is, the less likely a target sequence will be present as a random occurrence in the database. A preferred length of a target sequence is about 10 to 100 amino acids or about 30 to 300 nucleotide residues. However, it is well-known that searches for commercially important fragments of the Homo sapiens genome, such as sequences involved in gene expression and protein processing, may be of shorter length.

[0221] A variety of structural formats for the input and output means can be used in the computer-based systems of the present invention. A preferred format for an output means ranks fragments of the human genome possessing varying degrees of homology to the target sequence. Such presentation provides a skilled artisan with a ranking of sequences that contain various amounts of the target sequence, and identifies the degree of homology contained in the identified fragment.

[0222] One embodiment of a computer-based system is provided in FIG. 2. FIG. 2 provides a block diagram of a computer system 102 that can be used to implement the present invention. The computer system 102 includes a processor 106 connected to a bus 104. Also connected to the bus 104 are a main memory 108 (preferably implemented as random access memory, RAM) and a variety of secondary storage devices 110, such as a hard drive 112 and a removable medium storage device 114. The removable medium storage device 114 may represent, for example, a floppy disk, CD-ROM, or magnetic tape drive. A removable storage medium 116 (such as a floppy or compact disk or magnetic tape) containing control logic and/or data recorded therein may be inserted into the removable medium storage device 114. The computer system 102 includes appropriate software for reading the control logic and/or the data from the removable medium storage device 114 once inserted in storage device 114. Similar systems are described in U.S. Provisional Application Ser. Nos. 60/044,031, 60/046,655, and 60/066,009.

[0223] A nucleotide sequence of the present invention may be stored in a well-known manner in the main memory 108, any of the secondary storage devices 110, and/or a removable storage medium 116. Software for accessing and processing the genomic sequence (such as search tools, comparing tools, etc.) reside in main memory 108 during execution.

[0224] The examples below are provided to illustrate the subject invention. These examples are provided by way of illustration only, and are not included for the purpose of limiting the invention in any way whatsoever.

### 7.0 EXAMPLES

### 7.1 Construction of Trapped cDNA Libraries

[0225] The GTSs of SEQ ID NOS:10-5,504 were generated using normalized cDNA libraries produced as described in U.S. Pat. No. 6,218,123. FIG. 1A is a representative illustration of the retroviral vector used to produce the GTSs. In brief, pools of modified human PA-1 teratocarcinoma cells (PA-2; PA-1 that has been transfected to express the murine ecotropic retrovirus receptor) were typically infected at a multiplicity of infection (MOI) between about 0.01 and about 0.1 (although much higher MOIs such as 1 to more than 10 could have been used). FIG. 1B a schematic of how the target cell genomic locus is presumably mutated by integration of the retroviral construct into intronic sequences of the cellular gene. The integrated retrovirus generates two chimeric transcripts. As illustrated in FIG. 1C, the first chimeric transcript is a fusion between the coding region of the resistance marker (neo in the present case) carried within the transgenic construct and the upstream exon(s) from the cellular gene. A mature transcript is generated when the indicated splice donor (SD) and splice acceptor (SA) sites are spliced. Translation of this fusion transcript produces the protein encoded by the resistance marker, and allows for selection of gene trapped target cells, although selection is not required to produce the described polynucleotides (see below).

[0226] The second chimeric transcript is shown in FIG. 1C. This transcript is a fusion of the first exon of the transgenic construct (EXON1; the first exon of the murine btk gene was used as the sequence acquisition component for the described GTSs) with downstream exons from the cellular genome. Unlike the transcript encoding the selectable marker exon, the transcript encoding EXON1 is transcribed under the control of a vector encoded, and hence exogenously added, promoter (such as the PGK promoter), and the corresponding mRNA is generated by splicing between the indicated SD and SA sites. The region encoding the sequence acquisition exon (EXON1) has also been engineered to incorporate a unique sequence that permits the selective enrichment of the fusion transcript using molecular biological methods such as, for example, the polymerase chain reaction (PCR). These sequences are unique primer binding sites for EXON1-specific PCR amplification of the transcript, and can additionally incorporate one or several rare-cutter endonuclease restriction sites to allow site-specific cloning. These features allow for efficient and preferential cloning of transgene-expressed fusion transcripts from pools of target cells, relative to background cellularly-encoded transcripts.

[0227] Based on the unique sequence present in EXON1, which is indicated as a rare-cutter (A) restriction site in FIG. 1B, selective cloning of the fusion transcript is achieved as shown in FIG. 1D. cDNA was generated by reverse transcribing isolated RNA from pools of cells that have undergone independent gene trap events using, for example, a primer that consists of a homopolymeric stretch of deoxythymidine residues that bind to the polyadenylated end of the mRNA at the 3′ end, a sequence that serves as a binding site for a second and third primer at the 5′ end, and the sequence of a second rare-cutter (B) restriction site in the center. Depending on the size of the pool and the transcriptional levels of the fusion transcript, second strand synthesis was carried out using either Klenow polymerase, or by PCR. The reaction products are digested with two corresponding rare-cutter restriction endonucleases (e.g., recognize A and B). PCR conditions can be modified to enhance the size of the PCR products, using procedures such as those described in, inter alia, U.S. Pat. No. 5,556,772, and the 1997/98 PanVera New Technologies for Biomedical Research Catalog (Madison, Wis.). Prior to cloning, PCR cDNA fragments can be size selected using conventional methods, such as chromatography or gel electrophoresis. Alternatively, or in addition, to this size selection, PCR templates can first be size selected into separate pools.

[0228] After digestion and size selection, the cleaved cDNAs are directionally cloned into phage vectors (FIG. 1D), although other cloning vectors/vehicles could have been used. Such vectors are generically referred to as gene trapped sequence vectors, or “GTS vectors” in FIG. 1D, and generally comprise a multiple cloning site with restriction sites corresponding to those incorporated into the amplified cDNAs (e.g., SfiI, which allows for directional cloning of the cDNAs). After cloning, the resulting phage are handled as a conventional cDNA library using standard procedures. Individual colonies and/or plaques were picked and used to generate PCR-derived templates for DNA sequencing reactions.

[0229] A more detailed description of the above follows. The btk gene trap vector/virus containing supernatant from GP+E or AM12 packaging cells was added to approximately 50,000 human PA-2 cells (at an input ratio between about 0.1 and about 0.1 virus/target cell) for about 16 to about 24 hours. The cells were subsequently selected with G418 at active concentration of about 400 μg/ml for about 10 days. Between about 600 and about 3,000 G418 resistant colonies were subsequently pooled, and subjected to RNA isolation, reverse transcription, PCR, restriction digestion, size selection, and subcloning into lambda phage vectors. Individual phage plaques were directly amplified, purified, and sequenced to obtain some of the GTSs.

[0230] When selection was not used, about 1×10⁶ cells (PA-2, HeLa, HepG2, or Jurkat) per 100 mm dish were plated and infected with AM12 packaged btk retrovirus at an MOI of about 0.01. After a 16 hour incubation, the cells were washed in PBS and grown in culture media for four days. RNA from each plate was extracted, reverse transcribed, and the resulting cDNA was subject to two rounds of PCR, each for 25 cycles. The resulting PCR products were digested with SfiI and separated by gel electrophoresis. Six size fractions were recovered (between about 300 and about 4,000 bp), which were each ligated into lambdaGT10Sfi arms, in vitro packaged, and plated for lysis. Individual plaques were picked from the plates, subject to an additional round of PCR, and then sequenced to obtain some of the GTSs, as detailed below.

[0231] Total cell RNA was isolated using RNAzol (ISO-TEX Diagnostics, Friendswood, Tex.), using the protocol provided. RT premix, containing 2× First Strand buffer (100 mM Tris-HCl, pH 8.3, 150 mM KCl, 6 mM MgCl₂and 2 mM dNTPs), RNAGuard (1.5 units/rxn; Amersham Pharmacia, Piscataway, N.J.), 20 mM DTT, primer (3 pmol/rxn; either RTT-1A; 5′-TGGCTAGGCCCCAGGATAGGCCTC GCTGGCCTTTTTTTTT-3′ (SEQ ID NO:1), or RTT-1B; 5′-TGGCTAGGCCCCA GGATAGGCCTCGCTGGCCTTTTTTTTTTTTTTTTT-3′ (SEQ ID NO:9), Genosys Biotechnologies, Inc., The Woodlands, Tex.), and Superscript II RT (200 units/rxn; Invitrogen Corporation, Carlsbad, Calif.) was added to the RNA, and the RT reaction was carried out in a thermal cycler (37° C. for 5 minutes, 42° C. for 30 minutes, and 55° C. for 10 minutes).

[0232] The cDNA was amplified using two distinct, nested, stages of PCR. The PCR premix contained 1.1× MGBII buffer (74 mM Tris, pH 8.8, 18.3 mM (NH₄)₂SO₄, 7.4 mM MgCl₂, 0.011% gelatin, and 5.5 mM β-mercaptoethanol), 11.1% DMSO (Sigma, St. Louis, Mo.), 1.67 mM DNTPS, Taq DNA polymerase (5 units/rxn), water and primers. The first round of PCR used the primers BTK-1 (5′-GCCATGGCTCCGGTAGGTCCAGAG-3′, SEQ ID NO:2) and GET-2 (5′-TG GCTAGGCCCCAGGATAG-3′, SEQ ID NO:3), at about 7 pmol/rxn. The PCR premix with the first round primers was added to an aliquot of cDNA, and run in a thermal cycler for 20 cycles (94° C. for 45 seconds, 56° C. for 60 seconds, and 72° C. for 2-4 minutes). An aliquot of this reaction was added to the PCR premix with the second round primers BTK-4 (5′-GTCCAGAGATGGCCA TAGC-3′, SEQ ID NO:4) and GET-2N (5′-CCAGGATAGGCCTCGCTG-3′, SEQ ID NO:5), at about 20 pmol/rxn, and run in a thermal cycler 20 cycles (94° C. for 45 seconds, 56° C. for 60 seconds, and 72° C. for 2-4 minutes).

[0233] The products from the second round of PCR were extracted using phenol/chloroform and chloroform, and then isopropanol precipitated in the presence of glycogen/sodium acetate. After centrifugation, the nucleic acid pellets were washed with 70 percent ethanol, and resuspended in TE buffer, pH 8.0. After digestion with SfiI at 55° C., the digested products were loaded onto 0.8% agarose gels and size-selected using DEAE membranes (“Molecular Cloning: A Laboratory Manual”, supra). Generally, six size fractions (less than 700 bp, 700-900 bp, 900-1,300 bp, 1,300-1,600 bp, 1,600-2,000 bp, and greater than 2,000 bp) were separately ligated into GTS vector arms that were engineered to contain the corresponding SfiI “A” and “B” specific overhangs (i.e., TAG and GCG, respectively). The ligation products were packaged using commercially available lambda packaging extracts (Promega Corporation, Madison, Wis.), and plated using E. coli strain C600 (“Molecular Cloning: A Laboratory Manual”, supra). Individual plaques were directly picked into 40 microliters of PCR buffer and subjected to 35 cycles of PCR (94° C. for 45 seconds, 56° C. for 60 seconds, and 72° C. for 1-3 minutes, depending on the size fraction) using 12 pmol of primers SEQ-4 (5′-TACAGTTTTTCTTGTGAAGATTG-3′, SEQ ID NO:6) and SEQ-5 (5′-GGGTAGTCCCCACCTTTTG-3′, SEQ ID NO:7) per PCR reaction. The cloned 3′ RACE products were purified using an S300 column equilibrated in STE, essentially as previously described (Nehls and Boehm, Trends Genet. 9:336-337, 1993), and the products recovered by centrifugation at 1,200×g for 5 minutes. This step removes unincorporated nucleotides, oligonucleotides, and primer-dimers. The PCR products were subsequently applied to a 0.25 ml bed of Sephadex® G-50 (DNA Grade, Pharmacia Biotech AB, Uppsala, Sweden) that was equilibrated in MilliQ H₂O, and recovered by centrifugation as described above. Purified PCR products were quantified by fluorescence using PicoGreen (Molecular Probes, Inc., Eugene, Oreg.) per the manufacturer's instructions.

[0234] Dye terminator cycle sequencing reactions with AmpliTaq® FS DNA polymerase (Applied Biosystems) were carried out using BTK-3 primer (5′-TCCAAGTCCTGGCATCTCAC-3′, SEQ ID NO:8) at 7 pmol and approximately 30-120 ng of 3′ template. Unincorporated dye terminators were removed from the completed sequencing reactions using G-50 columns as described above. The reactions were dried under vacuum, resuspended in loading buffer, and electrophoresed through a 6% Long Ranger acrylamide gel (FMC BioProducts, Rockland, Me.) on an ABI Prism® 377 with XL upgrade (Applied Biosystems) per the manufacturer's instructions. The sequences of the amplicons, or GTSs, are described in SEQ ID NOS:10-5,504.

[0235] All publications and patents mentioned in the above specification are herein incorporated by reference in their entirety. In the event that one or more of the incorporated literature and similar materials defines a term in a manner that contradicts the definition of that term in this application, this application controls. Various modifications and variations of the described method and system of the invention will be apparent to those skilled in the art without departing from the scope and spirit of the invention. Although the invention has been described in connection with specific preferred embodiments, it should be understood that the invention as claimed should not be unduly limited to such specific embodiments. Indeed, various modifications of the above-described modes for carrying out the invention that are obvious to those skilled in the field of molecular biology or related fields are intended to be within the scope of the following claims.

The application's sequence listing, which the Patent Office published only in electronic form, follows.

SEQUENCE LISTING (5504 sequences)

SEQ ID NO: 1 - DNA, 40 bp, Artificial Sequence
  PCR Primer
tggctaggccccaggataggcctcgctggccttttttttt

SEQ ID NO: 2 - DNA, 24 bp, Artificial Sequence
  PCR Primer
gccatggctccggtaggtccagag

SEQ ID NO: 3 - DNA, 19 bp, Artificial Sequence
  PCR Primer
tggctaggccccaggatag

SEQ ID NO: 4 - DNA, 19 bp, Artificial Sequence
  PCR Primer
gtccagagatggccatagc

SEQ ID NO: 5 - DNA, 18 bp, Artificial Sequence
  PCR Primer
ccaggataggcctcgctg

SEQ ID NO: 6 - DNA, 23 bp, Artificial Sequence
  PCR Primer
tacagtttttcttgtgaagattg

SEQ ID NO: 7 - DNA, 19 bp, Artificial Sequence
  PCR Primer
gggtagtccccaccttttg

SEQ ID NO: 8 - DNA, 20 bp, Artificial Sequence
  Sequencing Primer
tccaagtcctggcatctcac

SEQ ID NO: 9 - DNA, 48 bp, Artificial Sequence
  PCR Primer
tggctaggccccaggataggcctcgctggccttttttttttttttttt

SEQ ID NO: 10 - DNA, 171 bp, Homo sapiens
  misc_feature 3, 8, 10, 13, 14, 17, 19, 34, 47, 54, 56, 82, 83, 109, 132: n = A,T,C or G
gtncacanangannggncntgtgaggacacagcnagaagcaagtctntgcatgncnagaagaacggcctcaacagacaccanncctgccagcaccttgatcttggcttntggcctccagaactgtgaaagantaaagattctgttgtttaagccagtacaaaataaatagg

SEQ ID NO: 11 - DNA, 294 bp, Homo sapiens
agagtgtgacgatccccctgatgcggctgagatgttctgaaatgaagacgttggctctcatccccagcctgaagagagaaaattctgagatggctcccttacggattgagagcaggcactgggtaggaacacagccaagaacgattgcaggatgggtccttccaggacactgacgtctcagcttgcgcactgtgagtccctggacgagttactccacctctctgaacctcctcctcacttgcataatgggaaaaataatggacatagggagatgaaacaagaccttggagacca

SEQ ID NO: 12 - DNA, 241 bp, Homo sapiens
  misc_feature 32, 107, 124, 167: n = A,T,C or G
ggatgccttctaaacagcctaccctgcccagngccatgattactgtgaccacatcttcagagccagaaaacaggatacctggccctaagcatgcactcatggagcanaagagttttaaatctgntatgccacagaagacagaagataacatgcttactacacttgtnaagcaacatgcagccagccatttccagtgcaaattatctcattgcatagtgtgacaactaaaggtcataaccat

SEQ ID NO: 13 - DNA, 197 bp, Homo sapiens
acaggatgcctgtaatcattattcagtgagcagcaacctgcagcagctcctcctgactggcagatgggcctggcggccacccagaggctggggacacagcaagaatccagcacagcaccgatcccgattccctcctccccaaactacctgagccatggacctcattttgtggacaaaattaaacttgccactttcac

SEQ ID NO: 14 - DNA, 387 bp, Homo sapiens
  misc_feature 25: n = A,T,C or G
tggtgcttactaaaaattgaataancgtggaaaagagaaaatctccctctttaaaaggaacactgttgtggacattttaaaatgcaaacgccttggctggaagtcagaaatcgtgttctctctgctaaacctggtgtagcatttaacacgcttgaagtggaggcatctggtcaccaatttcacagcctggacagagcaagaaggtgcggctggcttaggaggcggcctgccgggggggatcgtctgtccatctgggcttggtaaatgtcaagggtcatttccctgtcctgacatttgattgtgaagcaggttgcgaggtaactctttcaagggactggactgtgacagtcaccatagttggacaataaaacccgaacatccttcacc

SEQ ID NO: 15 - DNA, 326 bp, Homo sapiens
  misc_feature 24, 55, 60, 106, 143, 200, 205, 208, 231, 238, 243, 244,245, 250, 262, 264, 266, 273, 280, 282, 283: n = A,T,C or G
ggacagtggctaactcagcagacnaaccacagcttcctgccctttgcagatggcntgaanataagagtttgccaaacaactaagatgggctcttgattgagcaaanaaaccacaacatgggacacacagagccaccctattgncctactgtcattcaagcttaaaggagacatatctacagacagggtttgagcctagtnatggnganaactttcttggatgtctcaacancctgganatgannntcccnacaaggcagaanancnaggtggnacattgntnntattgctttttattcaattataaaagtaatgcatgctttttgt

SEQ ID NO: 16 - DNA, 166 bp, Homo sapiens
tcagtatcctgacctggcaaggtgttccttaacctcccctctggatcccccttagcacacatctgggacaatggagcgttcagcaccacggacagcattacaccctcttcaagtgcttgttaaggccatttgtctatttcactctcaagtaaataaaaatattttt

SEQ ID NO: 17 - DNA, 638 bp, Homo sapiens
  misc_feature 2, 3, 6, 9, 13, 15, 16, 18, 19, 26, 27, 31, 37, 39, 40, 48,54, 56, 66, 79, 80, 108, 113, 119, 122, 134, 135, 139, 140,142, 145, 146, 151, 154, 159, 161, 162, 165, 166, 170, 175,184, 214, 226, 227, 245, 247, 318, 621: n = A,T,C or G
annttnttnttgngnnannatctgannccanccagantnntactctgnggacantncatcatgacnaagtcccactgannacagacattcaagccatccatgttaganggganttgatnccnttgccttttgcnntganngnganncttcngtngccangnnganntgtngcagntcatcttgnacgacctctggctcattgcatgcctacatnatgaccaggttnnagtgattcccgtgcttcngnctcctgagaagctgggattacgggcctctgcgagactgtttcatagatgctcaagacaccagcaaaccagngccaccgaacaagtatgagaaaagaacaggctagattatgttatccagaacttcacaaccatcagatctagacagaaggaggtggacagtgaacacagaaaagctgtaaggtgtcctgtgacagatgtatgtggtggacacagcaggacccagaggaaggaagaaagaagctgctcttgaaaagaccctcaaaccacgatgctcaaggaagtgtcgagagatgaaggagaggtgtttgccaggcagagcagtagagacaagttttcgccatgttggtcaagctggtctcaaacttctaacctnacgtaatccaccccgct

SEQ ID NO: 18 - DNA, 403 bp, Homo sapiens
  misc_feature 2, 26, 32, 63, 68, 84, 86, 96, 103, 135, 145, 149, 163, 211,244: n = A,T,C or G
gnaaagagaaaaacaacattcaacancaacancaatttcccgaggatccctgcccacattcanagtgncacatttacctacttnanaggggagatnaaagccncactctaaggctccttatttccacaggctggnaagcaaacanggcntacaggctttgcangagtgtatcctaattctcttactgaagaaaagtcaacagcagagacancacagaaaaaggaatcaaagaggccaaatctgnggactcaaaacaataagaaaaaataaatcaactttgctaaaatttaagaatgccaggggggtaggtaaatgcactgggaagtatgtgtggactatgatgataataaatctcctttcaatacaactgatatttatcagaccttgaataaaacactgaatg

SEQ ID NO: 19 - DNA, 103 bp, Homo sapiens
  misc_feature 81: n = A,T,C or G
actttctccaagctactcagaagactgaagcagaaggatcacttgaggccaggagttcaagatcagcctgagcaacatagngaaaccctatctctaaaaatac

SEQ ID NO: 20 - DNA, 333 bp, Homo sapiens
gatcccatcatgcttctcctgtcaaatctccttcgtctcctcacatctgggaccctttctcagtgtgtcctggcctttcataacctgcacactcttgaagaggattgccagcaatgtcggagagtgacccgcggtgggggtttgtctgaggcttactcacaattgccgtgggttatggacttgtggagagaataccacgtacgcgagtgccctttcacgacatcacgtcagggtgcagggtattgtcctgacttaccactgtgaagtcacctttgatcacttgggcaaggtgaactctgtgcatttctccaacataaagttattatttttccc

SEQ ID NO: 21 - DNA, 92 bp, Homo sapiens
gtggggtctttcaagaggatcgcttccaggaggtcaaggctgccatagcgccactgcactccagcctgggcgacagggcaaaaccctgtatc

SEQ ID NO: 22 - DNA, 259 bp, Homo sapiens
gaaatatatcatgtagttacatttcatccttggaattcctctctcctgtgagtgcaacctgatttgagatgtaaataaactgcggtgataatgccggagtctcgtcagacgcccagttctcccgccagccgaggatgggagtgatgatgaatggtgccaggcccgctgcataatcttttctgttttaatactcgattatcatgtccctcatcttccctggacccaagactcaacacattaaaatctctttgtttcttcc

SEQ ID NO: 23 - DNA, 270 bp, Homo sapiens
gtggacgtcaagaggaacacaccagtggaagaagacacaagtggctggatattgagaggaacgcactggtgaaagaacacaccaacagatgccatccagctgacaggccatccaccagtgccgcagagtttggacagggcagaaggagagcccagccactgagcagcttgactccagggcaaaaccatcttcctactccgtctcccttctagctcccccatttactgactgctatttccactcaataaagtcttgcattgattctccaag

SEQ ID NO: 24 - DNA, 260 bp, Homo sapiens
gaggaaagtcaagtgcttcttgaattcttctggtgaccctgaggtgggaggtgagaagagcagtcctgggtggactgtggcctggcagctaccatcattgccctcttcaaccacagggtcatcaaggctaccattgagtggctgctttatcagtgaagacaacacagggagaagatctcatcagaggggacttggctatttcagtgatcaaaacatgctcctaaacatggataacatcattaaaagatgccaccttcctg

SEQ ID NO: 25 - DNA, 238 bp, Homo sapiens
  misc_feature 182, 185, 194, 196, 200, 201, 204, 212, 214, 215, 219: n = A,T,C or G
agccttcagggaaaagcaagactgtcctgtagaagcaccaggaagatgtccaacagtgctgtagctgaaacctgggagatggggactaagctgggaagctggactgccctgattgagtgttgatcttcacccttgatggagagagccatattcttagttggccctcagcttcatggctaacnctnggggttaancnttcnnggnttggtaangnnaaangctttggacctggttttga

SEQ ID NO: 26 - DNA, 209 bp, Homo sapiens
gtatggaaaaaccacagggagagggagaagccttgagatcacatggaagagaactgaggaattgagctgacaatgagaattgaggtcccagcctatggtcccagttgtgtgttccagccagcatccagttgtttgaactgcctctatactagtaaacaagtaattaattaatacaagtaaatgaaaacaagtaataaagtaattaatac

SEQ ID NO: 27 - DNA, 528 bp, Homo sapiens
  misc_feature 130: n = A,T,C or G
actgagagaggaggctcagtttcctaaacaataagatccacgtaaagacagctgagtgaatctgactcctctccaagtttttttgcagcttactcaaaagatgaggaagctgagatccagccaagttcanatatctagtaagtgacagaacctagataccaacccaagcatcctgactccagagccttcttcgctgtaccaaaggcttaggtcactccacttgtttgtttctggtcaaacatgtgttgacaattgtgtggatgcacacctagaatgttttggaaagatctgtgaaaatatggcagtgacaagatttccttttccaatatgttttccacagtaaaacaccagacattcatgattcaacccatgtctgggattctgcacgatcaagtgccctcagtattttaagcttttggataattcatagctatcatgtctaaattgttctgcttgttctaaatttgccctgcatgtgtacctttcaagataagttctttcagctgataaactcctgtttttaaatgc

SEQ ID NO: 28 - DNA, 317 bp, Homo sapiens
gacacacaactggactacatttcccaccctcatcagcagtgagatgtgacagagttctagccaacgcagtgcatctcttcaaggcctaggacatagacaattccctcttcctcctccaggctttttctccaagctgacgggatgatgattgcccagacaaccttgggagctgtgtgttgaagatgttagaaccaccagcagtttgactttccagttaattgcatggagcggggaccctgtacctttctctgcccactcaacagaaacacccaccttgaactattatgtgatatacaaataaactccttttgtgctcg

SEQ ID NO: 29 - DNA, 482 bp, Homo sapiens
  misc_feature 428: n = A,T,C or G
atcctactggaggagaccttgaggaacactaaaatagaggaaaaagttgtttactcagacccagggagtgactggttgtgcagtggtgagcaaaacgaagcatctgcctttaactcagtgagaggatgacaataaataatcatcaaacacatcattgcaaaataggaagtgaaataaaaagaagagcatgatgaaatagagaataacatggggttgtgtatggatggaataattaaagaaggcaaggggatcctaatgaatgagaagaagacaaaaatcctggaagggaaagagctttcttgcagaaggaagactatatgcaaagacctcaggaaaatgagaaactgaaagatgggccctgtgactagcatgaagtgggtgaaggagaaatgatgtgaaatttaattggaaaaatcaccaggaattanacctcctacagccatgctgccaagatgcagaagccacttcattccttgtgctta

SEQ ID NO: 30 - DNA, 258 bp, Homo sapiens
gccccatttccaaatatcatcacaatgaagattagggcttcaacatacgaattttagaggacacaattcagtccacagcaacgatgcatagaagacaaggcaatatgaagtgagaacagaggtatttgaagctgtcagccttcaagactggagtgatgcagtgacaagccgaggccaccagaaactggaagaagcaaggaaggatcctctcctggccttcagaactttgacagaataaagtttttttttttaagctgc

SEQ ID NO: 31 - DNA, 179 bp, Homo sapiens
gtaactgaagatttacatctgtaaatctggatgggaactgaattcctacatcatagacagtttcaaggagggaaggattatgtgttcaggaaatactctgcattctcaaaactctacattgttggtgcttagatttgctctgtgagaacctactgaaataaaccatttctctggaagac

SEQ ID NO: 32 - DNA, 138 bp, Homo sapiens
agacatgttctcagtgatacctgggctgcggtacagtggcaagatgatagttcaaggcagcctggaacttgggctcaaatgatcctcctgcttcagacttctgcctcaatgctgattataataaacatattctatttc

SEQ ID NO: 33 - DNA, 478 bp, Homo sapiens
  misc_feature 364, 417, 433, 439, 448, 455: n = A,T,C or G
gaccaggctaaaggaacagacaccactacagacgtggttctcaaggagagttggagctcaagtggggacaaggcccttgcttgccacatcacgtaaaaatcttacgtgtctttaatgcacttcacgtccaggaacctcagcttcaaagaaaaccaaacgctcatgcttcatttaattccccttattcggtcttccaaagaggtggagaatagctggtgctcactgtcccagacactgagatggcatttcaagattttctctgcaatctggtctctgaacagacttgagcctttgtctgctggttcccaaccctggttacacatcagaaccatgtgctccaggacctcacctcttggagtctgangttgagcccaggaaactctatgtctccatatttccatccagacaccctctctnttcatgaaacccttgnaaatgncttactcantctttanacatggcttaaacctcacttttt

SEQ ID NO: 34 - DNA, 227 bp, Homo sapiens
tggctggagctccagcagccatcctgtgaccctgagaacaaagccattcattgaggctaatgaagcaggaagaaggaatcctgagtccttgggaaacaaggatctacctgaatagctccgaatgcctacttctagatgtccttttaggaagagaagcacacccttgtgtatttcagccactgctatttaaggtttaacctaatcatgatattattggtttttcttgg

SEQ ID NO: 35 - DNA, 273 bp, Homo sapiens
ggcccagctcctaacatgcaggtgtcaccagagagaaatgcaccactgtgcccagcaccatagctctggctcagagagtttgcctgagaaagcagcagacagaaaacagaaggtgcgagttgctcccgaaggaactgacttcatgtgcaacagagctcggagaagtccaaggctaagcacactctccagaacagtggaggttgtgctgaaaggcaactgggaggcgacggagagcctgggaggtgcgggctacactggaggccagcaagtctg

SEQ ID NO: 36 - DNA, 366 bp, Homo sapiens
ataacagagagcgcaaacaacttgttcaaggtcattggactgaaagtgacagagccaggactctgtcccacatgcaaagactccacgcatcatgcctatgatactcagagaaagaaggctatcattataaagacctatacttgatgctagaaattcaagacgaagcctgggcaacatagcaaggctctcatctccacgaaaaagaaaaaaaattaaaaataggcatagtgaagcacactggtggtagtcttagctactcaggagactaaggtgggaggatccccgagccaaggagtttgaggctgcagtgagctatgcaaacaccactgcactccaacctgtgcaacagagaaagaccccgtctct

SEQ ID NO: 37 - DNA, 262 bp, Homo sapiens
  misc_feature 84: n = A,T,C or G
ctcttgcacatccctctttgggtcccgtttgctcagcaagacctttcttccgactgcacctctctctcctgctgcagtcaccgnctgagttgggccaggcagaatctccccaaatacttaaatgaaggcccacttcaggtttgggcctcaccgcagagctgagatgaaacatgcaaggcattcgggccccttccccttctggccccagctgaccttccacccacagcacttacactcaaataaaagaaaagtcactccctgc

SEQ ID NO: 38 - DNA, 88 bp, Homo sapiens
gataacaatacgaagatccacctgtcttgctgctgcccaagaccacacttccatccacaagttccccagtaaatcacctgctaccagc

SEQ ID NO: 39 - DNA, 119 bp, Homo sapiens
tgaagtttccagaagctacatgacacgcggttcaattccgattgaatgcggaaggagatatgacaacctcaacgtcctctattaagccatacattaaaaggacttgcaagatgtaaaat

SEQ ID NO: 40 - DNA, 253 bp, Homo sapiens
attcctctagcaagaaaggaagtgaaaaaggaaaaaaagatctactagcaattacagggaagtcaaaatgggagcaaaattgcattcatgcaaagagctcaaagaagacaactaatctttgttctaaatacaacatgggatcctcacaggtgggcacattagaaaagaccactgatcaaggaccaatcactgcagcaagtatgtgagttccataggtatatctgaatttcaaaaataaaaagatgctctcaat

SEQ ID NO: 41 - DNA, 348 bp, Homo sapiens
  misc_feature 23: n = A,T,C or G
agatggggtcttgctgtgttgcncaggctggaatgcagtggctattcacaggcatgatcactacatgctacagcctggaattcctgggctcaagtgatcctcctgccttggactcccaacaaactgggacgacaggtgcacgtgccaccatacccagcttccaggagagtttcacgcacacaggacaggatccaaaattgtcctaacttcagaggaaggattaagaacaagatttcttttcagcatcttgtgagctctacttctttttcccccctgcatggcatttggcatagtggtagcctatcctaaatatcctaattgatttaaactccattaaacattaaaaac

SEQ ID NO: 42 - DNA, 265 bp, Homo sapiens
  misc_feature 3, 74: n = A,T,C or G
ttnccggagtgtggatgtgaacacgccgtcttgggtcctgaggtggaagccatgtgtggaagatggagggcatnggttagaaggagtctagtccctgatggtcactgagctgcagaaccagcctgggctgcttcctgctggatgtcacttactagagagcgaaattaaatgtgcttcagctactgttactttgggttttctgtcatttgtagctgaaataatcctaatcaatatgagatatattaagtaaacaaaaatgcaaatg

SEQ ID NO: 43 - DNA, 288 bp, Homo sapiens
aaaacggctaaagcaagggtggaaacagccaccaggacggactggaggtgagctgtgctgcccacagcgctctgcttactcccatcctgcctatctctgcacttcagcgggaactcataagacacccacctgctcctgcccagcactttatgtattcatgcacaggatggaagacctccaacaaagcagcattgttgatttcttagtgttctcctcaccccagagcacatgcccaagtcccttccaaaccgtaaggactcttggaaaataaacaaatgaaccaacccc

SEQ ID NO: 44 - DNA, 192 bp, Homo sapiens
aattactgggttaaaattactgacctatcatcactctgcagagaagccacgtgatacctgaagacattctgtttaccagaagtttccagtggagaaactttttcagaagtctcctattgcaattgacaagtcttgttgttctataatgtcattgaatttgtaaactattaaagtaatgctctttttcattcc

SEQ ID NO: 45 - DNA, 153 bp, Homo sapiens
aaaatgaaggatggaagcaaaaatggagatggaacgaatgagaaaaaatagcataagaacaccaggtcatcgaggcgaaagcagtgatattatctgggaaactggaagaaatccaattgtggataaagataaattacagatgaaaccagtgct

SEQ ID NO: 46 - DNA, 175 bp, Homo sapiens
ggcaaagatgaaaccacaagagaaagcagaaagcagaaagaaggacaactgctatagactggatgttggtgtgccttcaaaattatgttgaagcctcatcaccagtgtgatgacatttggatgtggggcctttgggaggtgaatggtgatgagagtaaagcccgtatgaatgaac

SEQ ID NO: 47 - DNA, 278 bp, Homo sapiens
  misc_feature 2, 10, 35, 37, 77, 180, 189, 191, 254, 263: n = A,T,C or G
gntgatgtanacagtaacaccaccaccaccactgnanccactccattccatctactatctagaaagagcagttctcnaatgggaaatgatgaggtctcatgatgttgtccaggttggagtgcagtgggctattcacaggcacgatcatagtgcactgcggactcaaactcctcggctcanggaatcctntngccttagcctcctgagtagctgagactaccaaggctgagaaaattatttcaagctaggctggnaaacacacntgtaaatagtatgaa

SEQ ID NO: 48 - DNA, 240 bp, Homo sapiens
  misc_feature 21, 172: n = A,T,C or G
accagagtgaaagacaaatgngtattacttgggtggcttatgaacagcaaggaaaaactgactggcaaccgccatggaaagggtgtgaaaccgtaaccacgaggactctcacatttacatgttactgactagcgaatgtctaggcctaaaacatctgccctcttatagctgntttattattatgtaaacatggctacaagatttctgacataaaatagtagatgactcagtgtcttcaaa

SEQ ID NO: 49 - DNA, 306 bp, Homo sapiens
gtgtcctcttgatggtggcggcccacactcctgaccagagccaatgaagaagagggcagagcagaggggagaggggctcaggagtaaggctgcaggaagcaaaggaagtgtcaactcaagagccacaaacaacatcagctgtgcacctggcaaagagcctgtgaatccttcagaattgctattactaaaggcatccttacagtcaagtctttgaacaatttttcagatttatgtcatatgaaaccatgggacagacataaaccaaattgtaaaaaataagtaaatgaacaacaaaggctttaagag

SEQ ID NO: 50 - DNA, 265 bp, Homo sapiens
gtggggtctttcaggatgaagtcatgggagctgaacgaattggcctgaatcccaagaggggagtgttcagggcgcgcgtgtccctcggagaggctgaggtaacgctggctccttcccgggagtccctgaacgcccggctttggaatctgcagacagctcttctagcagggcgttggcacctactgactaaccgtgcaatcactcagcagctgtgatggttggtgacatgtctttcacagcccaagatagcctccctagactgagc

SEQ ID NO: 51 - DNA, 243 bp, Homo sapiens
  misc_feature 19, 28, 29, 36, 38, 43: n = A,T,C or G
tggggagctcctgctttgncaaaactcnnagacgtnantcaanatgcaagaggaccatttcccacatggttatgcctccaacaaatcagcagcaagcacacgttgcctaaccgcccaaacccctccccacaaaccaccttggaaaaatcccggccctcaaattctctgggagactaatctgactgacaataaaactctggtctcctgttcagctgcctttgtgcaaattaaagagtttattgc

SEQ ID NO: 52 - DNA, 181 bp, Homo sapiens
gtgcaacccccagcccaggaggagacttgactcgcctgaggtcagctggagccaggaacacctttgtgcaacagctgccgtggcccatctgtgagagacacgtggaccccgtgcctcgaaacaggtcctgggagtggtgtaggcaccatgatcccctcagaagattcagggaaaaaaaaaa

SEQ ID NO: 53 - DNA, 332 bp, Homo sapiens
  misc_feature 30: n = A,T,C or G
gcccctacaaatgcatggactttgactctngccagacaggaccaagtttgtcaccatctggcaatcatcgtgaggccggaaggggagactctcctcagagcacttggtatgatgtccctgtgaagaactttgtcagctgggctggcgaagtggtgtgatttccagtgtagactccacacctgaggtcctcaagcccagaaggccctttgaggtctcactaaagaggggctagcagcaacatgggggagtccttgggagctccacgaatcagaatcctggttctattatttatgaaggataattattaaagtaaattcctctgtctttaggtc

SEQ ID NO: 54 - DNA, 461 bp, Homo sapiens
tgattccataaatggtcattataaaagaaactgcagaaatgaaaaaagctgtccatcataattaaaggccaggttggcactgatcacaatctacgtgtacttcaggatgaatacatgaccaacaatcttgtctggctctcctcctgtggattatttgattgaatgactttcaaagcctgtctttgttttgtgttgctataaaggaatatctaagactgggtaataacttacaaaggaaaaaagggtttatttggctcacaatactcatgtctggaaaagttgaagactgggcatctggtgacggcctcaggctgctcccactcatggtgaaaagcaaagtggagtgtcatgtgcaagagatcacatggtaggaggggaagcaagagaaagattggggacgtgcccaggtctttttaacaaccagttctcaaaggacccagcttgacgagaactccttaccc

SEQ ID NO: 55 - DNA, 218 bp, Homo sapiens
ataaggaggatcgtttgagaccagcctgggcaacaagagtgacacccatctcagaaaaaatttcaaaactactcggccatggtggatgatgcagcagaaggccttgcatcagagggccttcttgtgaatgcttgtaagccatcttataccagatgcaggcctcttgaccttggactccccagcctccaaaactaataaatgtcttttctgtataaatt

SEQ ID NO: 56 - DNA, 633 bp, Homo sapiens
  misc_feature 13, 20, 104, 133, 145, 198, 226, 249, 263, 282, 289, 292,349, 433, 449, 451, 458, 459, 461, 467, 483, 489, 495, 500,507, 509, 531, 549, 555, 557, 560, 575, 580, 587, 604, 606,612, 620: n = A,T,C or G
ccaaactgaaacncctcaanaccagtttctgttatattaacaccttggtgccggcaatggatatcagttcgagaactaaccccaggggcaaaaggactgacatntgaaagcagcggtatataactggtggctntaagaatgagtnttattacgccctctgaagtctagagcccactgaaccctgaagggagtaagacngacgaatggaactgaaaggctcatggcntattcacatacttccgctgcttntctttgtgcaagtngccgaagacatgccacagntgctcgncgnagtaacaaatgggaactacataagtgaacctgtaaatcataacaatgttaggcgatntctctttaaaaagctgtaattctttaatcttatttgcccaatgaatatatatatacatacatacatatatatggtttgctttgntttttttttttaaaananagatttnncntttttncccaaactggacccanaggggngatttnaaatnacttggnanctccgccttttggttttaaaanaattttttgccccgggcncccaanangcngggattacagggggntgccnccccacncgggggaaaaatttggntntttaanaagggggnggggttttccccc

SEQ ID NO: 57 - DNA, 650 bp, Homo sapiens
  misc_feature 494, 550, 593, 605: n = A,T,C or G
ggaccaggctaaaggaacagacaccactttcagacgtgggttctcaaggagagttggagctcaagtggggacaaggcccttgcttgccacatcacgtaaaaatcttacgtgtctttaatgcacttcacgtccaggaacctcagcttcaaagaaaaccaaacgctcatgcttcatttaattccccttattcggtcttccaaagaggtggagaatagctggtgctcactgtcccagacactgagatggcatttcaagattttctctgcaatctggtctctgaacagacttgagcctttgtctgctggttcccaaccctggttacacatcagaaccatgtgctccaggacctcacctcttggagtctgaggttgagcccaggaaactctatgtctccatatttccatccagacaccctctctcttcatgaaacccttgtaaatgtcttactcattctttagacatggcttaaacctcagctcctccaagaagtcttncaagattcaccagatgaaatgtatggccatttcttctacattccccacagaacccnggtttgaactttacaggcttaaacttatttctatgactcgctncactatgcattnccgcttctatattcctaacacctggccagaaaagggctaaaaatt

SEQ ID NO: 58 - DNA, 196 bp, Homo sapiens
gtgtttttcaacgaagtgctaaatttttcctggctgattccaagaggaaaccttcaggtcatatgtgagtctccccaccactagaactcttaagtggctgctgttatggaaggtcaggctcataatcaccgcatattaagtccttaacagcaatgtctggctcttcattaatctgtaaacttactgatttaccgag

SEQ ID NO: 59 - DNA, 415 bp, Homo sapiens
ctgggattcccgcaactgccagtggtccatggtaccctcatccgcccacaccctcaaggatccagtgtcccacttgcggcagccctgtggctttgcctgcacagctgagacctcgaaacccagctatgtggctccacaccagacctacctttcttccctctgtggcctggactttccagagaacacaagcaacaagaagatcacaaccctaaggagggttgcaactgagaaggtggcccttcctgcagctgccaggctgttatctgcacagagcattgcagcgtgagccacctcagagatggcagggccagagcctaaaaaagcagcattggcacagccgcagggatggatttgaggagccctggaatactcccccaaaaatgccgcagttagaatacacagcgtatccaccagt

SEQ ID NO: 60 - DNA, 177 bp, Homo sapiens
gttttatgtgcatttctcttcacccaactagaagacagaagaaaaacagctacacaggcttactgttctctctcgagcacttgcaacaactgtttggaatggcaacatagatgcattgagtaataaagtcacaacttgctgccaatcattttgggctaaataaagctaacattccag

SEQ ID NO: 61 - DNA, 372 bp, Homo sapiens
  misc_feature 123, 135, 170, 175, 191, 210, 213: n = A,T,C or G
aaaaaacgttgttttaggagtcggcatggtaacagggccaattcttttagagccaccaagcttctccctgcagtcatcctgcccatggctgttgatggccctgatggggcttggagcccccanaatgtgcagaanttggacaaaggtggtcttcaaatgcaatggttgtnttatnaccgaaagcccacggnatccagaggaggccctttnctncgaagtttacagagagcacaggtctctgtacgtcccaagtttcccctgctgccaaatgcaggggaggagagaattctggaagcccaccctgtcccatggctcccctggcacatggagccactgaatgtcttgtgaacattaaacaaatgcttccaagtg

SEQ ID NO: 62 - DNA, 120 bp, Homo sapiens
ggcctcctctcccctgcccgcaatgccatgcgagctgaccttggacctgcgacccttgccttcatctgtgccgagacctacacaaacagtgatgaagcatcgcagccggaggtgggagag

SEQ ID NO: 63 - DNA, 299 bp, Homo sapiens
  misc_feature 20, 21, 24, 28, 29, 32, 36, 41, 54, 56, 60, 62: n = A,T,C or G
cttctgttaagctacaatgnnttnaaannttngtgnctttntttaccgcccaantnaaangnttttttttgcatgatcaagcctttcctgatgcccttggtgagaggggagctcccctcccctcagctctggccacagtgtatccggatggccactgtcccactgcagcacgtgggcttgttagctgtgatggctcctggagggctgaggccacgttcaatgctgtgtctaattcagctttgtatccccaacatctcacgcagtacataaaacagaataaacacttttgtttataaatg

SEQ ID NO: 64 - DNA, 358 bp, Homo sapiens
  misc_feature 5, 7, 9, 13, 21, 22, 23, 24, 29, 33, 41, 47, 62, 63, 67,74, 125, 281, 282: n = A,T,C or G
caaancngnaatngaaaaggnnnngtccngccnttgggganatcttntaaaattcagtgaannaaangacgaanctaccattaattttaccatccagactgcaccaaaatgttaacaatactgtnttctctcctattaataaacctgtacttatattttataaaattgggagcatatttcatacttttataacttgtgtttttcatgtatatcatgaacattttccaagattgttaaatactctgaaaacatgatttttaatagtaatattaaatatttgnnatattccttttgatagtccactatttatcctacatgatctataacataagtataaataaaaacattttaccttcat

SEQ ID NO: 65 - DNA, 195 bp, Homo sapiens
acatggtgcccttaagcagtgcgcagcctgtataattacacaaaggaaggctggaaaaccagaatgttaaaagcccaagaagaagagtagctccaaagatccaggaagcagagcaccatcaccaggataaatgaatttcaactatattgaatcactgcattgttccattcaagatataaattccagagagaaagc

SEQ ID NO: 66 - DNA, 323 bp, Homo sapiens
aaattccagggactaatattgagatgaaccaggcatgagaccaagctgcaaaattccagaaatgacctccaggttgttagtctacaacccagccatcgtcaagataacattagactgcgttccaggtggaccatgactcaagatagccaccagaccaaggcacggacacctagcacccagcaccactcctgcatgccccccactctaagttcccctttataaacacctctccacagtcgaaagtttgaaatcgtcttttaagggcatgagcttggccattcccagatcttggcatttgaataaagtagctctctgttcatcac

SEQ ID NO: 67 - DNA, 175 bp, Homo sapiens
gaatgagagggagaagaaagaaagggagcctagacagccgagataagccaagaggagggaagtggagaaaggaacactctctcagtatgtcaggcatttggtacagaatcagagtcccaaatgggcacatttgcttggccaagcttaagtcacaggcttttctaactgccaaagg

SEQ ID NO: 68 - DNA, 243 bp, Homo sapiens
cctgacttcccagacacctgaagtgtggggccacactgtcaagtcgccccttgtcaccatgactgggatgtatatcacagatctgcttcatcgcagcacagtctggaaggaagcctgggattccagggctgggagagacctcgagagacagtcaagctcatcacttcaactgcaggcagagaaatgcaaatataagagctgattcctaaggtttcttcaatgaataaaattatacaaatgtct

SEQ ID NO: 69 - DNA, 179 bp, Homo sapiens
ctggaatgttaagttgagaatttttcagcatctccctgtctgccagatcctatctgagatgcctacgctaagaagccaacacagagacacgcaatgcacactatcagcaggagtggcttggaaattctgacttgtattgattgagacaccttcccacgaagaaagatgggattagtaat

SEQ ID NO: 70 - DNA, 160 bp, Homo sapiens
  misc_feature 146: n = A,T,C or G
ggcagcaaacaagagctctgaaaggggaaggaagccaggagaaagccagctccattagtcacgcagcagcatatcctgtcacaaaggaccccagttgagtaatcgcccaaaatatgcctgttatttttttctgtcagaaaaaaaanggggcctgccaaaa

SEQ ID NO: 71 - DNA, 585 bp, Homo sapiens
  misc_feature 316, 317, 319, 320, 324, 326, 329, 332, 333, 337, 338, 350,353, 355, 356, 359, 365, 370, 373, 385, 398, 399, 413, 433,451, 472, 475, 480, 484, 485, 486, 489, 497, 499, 503, 506,513, 521, 531, 533, 534, 553, 562, 565, 566, 571, 572: n = A,T,C or G
ctttcaacaaatgacacctctcctctgcttcaacttcttcaagactttccacacagtgggagccccagagtgtgagtataagctgtgtttatcttgcaggttcaagcaaatcctactgtggtggggcagaggaccttgagaaattgaagttcttggaaaataactcatcttcaacctaagggattagggcacctgagcttcgtctgaaaagattgagcctgctggattgatcagcaatttccacatcagcaggaaatgtgctgaccttactttttctaagcatttgcagaaaactggtgaagaaaaaaaagggggnntnntttncnttnatnncccnnttcaaatttttnaanannacnaagggngaatnganagttgggggttncaaaaccaaaggnnttgccaaactgggnttgggggaaatttttgcagncaaacccaaaagcctggnaaggcctaaaaaatttagcgnggngcccncccnnngancggcaacntnaaanaanggccttngttccttncccccccccngnnccgtttaaaaaaaacccgnggggttttnaanngtttnnttgccccccaaaa

SEQ ID NO: 72 - DNA, 630 bp, Homo sapiens
accaagagagttctctgccatgaaaagaaaatctgaggtgaagctgaagttgacaaagttcaatctgaacttaagaccaaggacacacaacatgagcacttactttgacagttctgacatttcttcatcataaattctcttcctatcagacaattcatccggcaaatatcgaaatattaattcttcggccagaacagttatgttaaagtttctgcttgccaataactgtaacaaaaaaaagtcaaatgatactgtatggtaattgattctaaaggacgaagcttccgagtggaaaggtgaacaaggaggtggtgggtgggatctctgagcaggtaagaaggaaaagggatggagagagaggcgggccagcctgtaacaagagcaggggcagcccctccactgtgagaaaaggccaggaggaggcgttcacctggatgaaggatgaggcaactcaatcttgacagcatctacattttcaaccaagtgccatgatgttggtgagaggggaggaagtgaagtagggcatgttgggagaggagagacttttgcaatgatcagcttggaaagtgaagactggactactaaaagaaagaatgtaagaatgattacttatgttttgagtctaaactt

SEQ ID NO: 73 - DNA, 424 bp, Homo sapiens
  misc_feature 159, 206, 215, 223, 228, 230, 233, 241, 243, 249, 257, 278,281, 293, 296, 302, 309, 319, 322, 329, 333, 352, 385, 393,408, 411: n = A,T,C or G
gatatggacaggagacggaaatactgggtagaaaagggcagttccctggcaaagcctcaccctcaagcctggatacctgctgtcttaaacgaaaacgaaaacaggcatttctgtgttcatgctccaaaagttatcttttggcctgccacaccccctatnctgccccatatgaatcccgaaccccatacttcaaaagccgaccaacnagcccccanaccaacanaaggntngcngaaccatntngcaaanaaaggganaagaggaggaacatttgaatnccnaaatgagttcanctnggggcngtcaganaggagtccanccnctgggcngccngaattcaagggaggatcancttttcctttattccctttcttttgcttcccantcattctngttgaaggcccttcnccncttcattaaaact

SEQ ID NO: 74 - DNA, 410 bp, Homo sapiens
gagtaagaagcaaagacgggtgtgggcatgtgactagagggtcctgaggagcagaagatgagttgcatgtgctacgatcgcctgtttgacttgcaaagcacatggctctcactaacatcagtagaatctgaatccatggaacagatctttgtcaattactattgttattagttttcctttttatctgatagttcagattctgtaccctcttcaggtttccagaagatttcttttcctgtaaatcttgatgagaggcaaaacttgcttcccactgtagaagtggaaggctcatttcccagtctcccttgcagttggggttcagaatatgactgagctcttcctggcagatgcacccttctagtagtgcaaagaagctgtgaggaggaggaacattgctggaggttggcggc

SEQ ID NO: 75 - DNA, 337 bp, Homo sapiens
acaatgagccctgaatcctgctacatcagagagaacaagatctttgcttcattccctgtggtaattacgaggttagaaagaactcaccagcgaaaatttctggacctgatgcctttataaacggtggcaagtgctgctgcatttcatggcctcagatcaaaatacaacctcattagctgctgtgaacacaatgttcctgttgaagaatagaatggaatggagttaagagtgtagaaggtctgatgcaaatttactcctactcctattgacaaagagtttgaactactgaatttgtatatgaaagtcagggcatcctattgttttcagttgtcataag

SEQ ID NO: 76 - DNA, 150 bp, Homo sapiens
  misc_feature 138, 139, 142, 145: n = A,T,C or G
gacgtctggggagctcctgcattaagtcagaactgagtgttttttaagcaaaaaagaaaaaaggaaaaaaggggaggaatgaaagagacagagccggccactacctcatctagcaaatagaagcctacagacacttannganggncaccc

SEQ ID NO: 77 - DNA, 320 bp, Homo sapiens
gaaatcgaatgcctgtcttgaattcatgtgaagcacagaggtgccagatctacagtataatgaagaactaaggctgcaaatgcgggaattgaaagaaccatctttaaggaaaggatcaccactccaagatttaacaaaaatataaaaacaccttccgtgttgcttagtctcaaagaaagcctgcaaatatggatactgaataagctttctcaaggattcttctaaatccagtcccatctctgtgggacgctcatccctgttggccatttccatctgaatcactcctcctcctgagtttaataaagcacacgccgggcccg

SEQ ID NO: 78 - DNA, 338 bp, Homo sapiens
ggttctttgagaggaaggtggaggggagccatcctaaaatttgcagcagagcctggtctctaacacagcctcagactgtggatgaagcagatgacctgctcagctttccttccaacattgctgtttgagcgcatacagccctttccttgttttgaagacgctagccagctcagccagagatgctctttgccaagtctgcagtcttgggattagagtatgcactttaacaaatcttccttcttgagcagaatgtagttggcttgcttcaccaccattctttcctacctccaaaggctgccaggcctgctaaatagtgattaaacaaagattaaaattcc

SEQ ID NO: 79 - DNA, 396 bp, Homo sapiens
  misc_feature 299, 327, 333, 339, 351, 367: n = A,T,C or G
tcggaattaaatcattgatcccagaagaaagggaccaccacagtgctacggaaaacaggaattgtgagaagttatgggatccattttagcttgatttactcacagactccttaagcacacttcataagatgaggaaactgagacactggaagaggaagtaacttgcccaatgtcactcagccaggaagaggtggaacccagcattgaaatccagacagtctaactccaaaacaaataaacaataccaccacacttttatcttctaggctatacatttctaatggccaatgaagaaaacnaactgaaaacaaaattccttctttctgntcttgnttattnctaaagggtggncttttagctcatggtngaaaattaaagtagtaacatggtttcagt

SEQ ID NO: 80 - DNA, 83 bp, Homo sapiens
atcttcactgaggtggaggagcagtgcagtggccaagagaaagatgggattgacagagggaaataaaaagaactctgatatgt

SEQ ID NO: 81 - DNA, 314 bp, Homo sapiens
  misc_feature 103, 260, 270: n = A,T,C or G
gtcatttacaacaggaattaaggacaccgaaaaaaaatctaaagaaactgagaggtggaactgaaaatacagaagcagatttgtggtttggaagggagctagncctcatgaaaaacagcaacctggcaaacactattttggaataccgtcattttcaaaatatacatatattttttaagcataaaactgcatttgaagtggaaattaacgtatttgtttttagcacctcagctaagtatttaggatgcaaaaaaaaaatntaaatttttntggaaaaagaatcattcaaataaaaaccattaaaggggaaaact

SEQ ID NO: 82 - DNA, 382 bp, Homo sapiens
  misc_feature 227, 304, 314, 357: n = A,T,C or G
ggacgggggcacgagaaattctagccagaaaagtgtgggtcactgacaaaccgccactctcaagccaaaaaacctgaaaccacaggccaaagtgagagcttatatacctgttttcccacttgaatgctgctttttcctcaaccacccctggccccgccctgcgccatcctgtgcctattaaaaccccagactcagctagtacatgggactatggctggacgtggganaaaagcagcttgacttcagaaggacagcttaacagcgtaacttcggagaagaatctggctggagatgacctgacttnaggggaaggnaatcttcctacccccttcgatttacaaggtccctttccactgngaggcccttttattttgccataaaa

SEQ ID NO: 83 - DNA, 347 bp, Homo sapiens
  misc_feature 309: n = A,T,C or G
gtggatgaagttgggtgcttcctgtacattgattttgcttccttctggctcaccaagaaaatcaagaccaaaaaagtgactgaaacccaattacttggggaacagatgaagaggatcccaagcaatggttgagtctcctccatggctccagaactcacaggatagcccctttctcgctggtccatggctcctgctctgattttagtatctggttcctgggatcaaataacatcatctcctccctccatccctccaggactaagggtagcaatgatttattcttctttgcagtctctgagtcacatcagntcccttgcttgctttctcaacttttctattatctatgg

SEQ ID NO: 84 - DNA, 260 bp, Homo sapiens
acagagaaacggaggcacagagaaggaagcggcagttaaagctgcgaagaacctaacaaatttcaagactgtaagtgccttttcccaggatgccagcaagtactgagcctgtattttgagctgcatcaaaccctgttggaataaaaaaggacatttctaggagatcagtcttcaagattggccccagtttccccagagtaggaagaggcaggaagccagagcacatgttctctccagaaataaagttgttgcagtggcct

SEQ ID NO: 85 - DNA, 169 bp, Homo sapiens
  misc_feature 3, 12, 16, 20, 21, 29, 44: n = A,T,C or G
atnctgcaaggngtgngtgnncttcccanccatggattacaggnaaaaacttgactgcatgtgatcctttgtagttaataacatgatgattgtgttttcacactctcgtgtgagatatgcctccctcaaatcttggcacattacccatctgacattaaaaaaaaacaac

SEQ ID NO: 86 - DNA, 238 bp, Homo sapiens
cgctgcataattgtaccatgagccacgatcctaagtcaagagacctttctctcaccagtgcagatgattgctccctccaggtgtgtaggagggaggatggcatggctttcatcaaaccgtgagctttttcagaacttccaacccaccataaagctcatctgaagaatgtttgcttttccctgtcaaatatttctctgatccaaagtctgttaacaatttaaacgtcaaatccccctct

SEQ ID NO: 87 - DNA, 634 bp, Homo sapiens
  misc_feature 516: n = A,T,C or G
agtgacatgcttgaggaagagtgatgaataatactgaggatgattcaacgtctcttggttttacttctgcaccacccaaacagaaaataattagacaagaacatttctttttctatatcagtgtcataacatgtattattacagtgcggtgtaaccacatgtcagaagagaatgtgtagctcaaaacaccgaactaggtggagaggccgaggccttaattctccaagagactgggacctgtgctgggttctagcgcctgttcagcgtcagaatcatcagctggctgtgagcctacgtgaatttttctccactcaatctcatcatccttcagacaggcggagagagcgggatccatctatgagatttctctgctgagaaatctcctccctccctccaatgaagcaacagcaggtcatatctgaatgcagaagcatggccttgtgctgggaaaacacatcctggctgtagagctctcaggcttctagagtcaaagccaagggttcaaatcctctctgncttactcagaagccacatggtcctgagacagtgaaagtaactctgtgaacctcagtttaccaatctgtaagatggggatcataatgtaaaaagatggcattaaaacttacattgggaa

SEQ ID NO: 88 - DNA, 180 bp, Homo sapiens
  misc_feature 42, 48, 55, 64, 65, 67, 69, 73, 76, 77, 79, 82, 142, 143: n = A,T,C or G
caggccttgcctcatcaaggtcagagcagggcttcagggggnttaccntggatangacttcttnnantngtgnggnncntgnctaccttttgagcaagttcagcctggttaagtccaagctgaattggccaattcttttgcnntttaccctggaagaaatactcataagccacctctgtt

SEQ ID NO: 89 - DNA, 386 bp, Homo sapiens
  misc_feature 83: n = A,T,C or G
gcagtcttagtggtgctaacaatcaagtggcttgccttgttctgacctgagtgttcgccaaacactccccaggctacaacagncgcgctcccctctgaaatcaggacacaagaattgaaagaaactggaacagatacatcacttacccctggcatccagaaccccagagcatccttcccacaaattggttataacaaattaccacaaactcagtggcttaaaagagcaccaattaggggtctagcatccaaaatatataaagagctcttttttcatacatatccatactatataaagatctctcacaacaacaaaaagataaccagcccaattttttaaaaaaggtcaaaaaatggaaatttcctcaataaagatatatagtcaac

SEQ ID NO: 90 - DNA, 595 bp, Homo sapiens
  misc_feature 515: n = A,T,C or G
ggaaacagaagactttaaaaaaagaaaggaagaaagaaaaagaaaccaccaactctgcaaagttctctggaatctgagaagtcaagcagggcttctgccttgttcatggtgagcctaaactgtgatttcgtctctagacatgacacatcaggcatgcctggatctggtttttctgccaagccttctgacagtaacgcaggcatttgctagtgtatatggaggaaggctgacttgaagtccccagtacatttcacccagtgagaagaggacaacactgactccagaaagccttttgctgacctgctctttgaaaccagtgtgcctgccaggaatcctcgccctgtgccccgcctacactcatccccacctaccttgtccactctgccgccacagcttcagtcaggtcctcatccctttcttcacttcattaccactaaagaaagcctcctcctgggtccccatgctccagtctggctcccttccgatgcatctcccctgcagctgtcagtcattgntctaaaatgcaaatctgaccatgccactctgcttaaaactcttcaatgactatgctaacattaaagatgaagcagattcc

SEQ ID NO: 91 - DNA, 159 bp, Homo sapiens
gctgtgaagagctcctgggttgctgaacaaatggagttgctgcaaggatgccatgcctggagagggcctggaagccctgtgccacacccccatgccttgccctatgtacattttcatctgcatcattggcaacatcctttataataaaccagtaaaagt

SEQ ID NO: 92 - DNA, 555 bp, Homo sapiens
gtgctcaattttctactaaggttatgtagtatctttataaacagaaaaagaagtatttttaacctttaggaaattcttttggcttctggattttttccagtattttgaagtgtttcctcagaaaagattcgcagaagtaatattagttcaagagctcataagacattgagagaatgaaataacacccatgtaaaagaacctaatctagtgcctgggacatggcagatgctcaaatgttggatcttaaatggatgaactgtcaagtcatcaaaacagggattcgcttaaagaacatagtgttctgccttctagctaagaagcattcgatccacttaactgaattgtgaaactgcaagataaaggataaagagcgctgaactgggcctccataaaagtgaaccacagatttgctcatgagctgtgtgactttggaccaatcacattctctgggcctgtggcccacaacggatgagtcatgaacatttatctgtatgtctgtcatctccattagaatatgttcatataggattatatgtccgtgaagacgggacctgt

SEQ ID NO: 93 - DNA, 322 bp, Homo sapiens
tttcaggggtaatcttgtgacaaaccaggcatggagagctagctgtgaaattccagagatgatctcaaggtaattagtctacagcccagccactgctgagatgacaccagcacacgctccaggtggaccatgactcaagacggccaccagaacaaggcataccgaccttacactcagcaccatgcccgcatgcctccctctccaagttcctcttttaagcccctctccccagcctaaagtttgaaatgtttcttgtaaggaatgagcctggccatttccccaaccgctggcttttggaataaagtcactttccttttactgc

SEQ ID NO: 94 - DNA, 634 bp, Homo sapiens
  misc_feature 612, 619: n = A,T,C or G
aaacttggaggctcagaccctggtttaatgtgtccttctcttactcctgagttgcaagcagtaataaaagagggtggttcgtgtacagtactcgatcagcctattccactagatagattggtagtcaaaagtattgaaccactccatgtgtcagtctttgggctgagaaatgcttttcttatacaacacgaaaacagatatcgacagtgtatagcagcattcttattacaagcccaaacggaaaacatcaaaaaaacatggatggcacaaataacaactgcaatttcttgctttaccaagagtcaggaaaccaagaaaatatctttattcacattgcccgcagaatcctctgaaatttagggacctaaaacaagtggcatgtctttttagaagattatggtttaaggtataatttcattcaaagttttgtaacacttagctagtgataagctaggaggaaatttgcattttaaagaagtttcagaatttgaaattttgagctaggaaaatcctcagtatggaggaataatgactgcaacaaatttgaactctgaggaatttcttgacaaatatatactggcatccagattaccttctaatgctttccgtcangtttggnaagaggtgtgagtga

SEQ ID NO: 95 - DNA, 345 bp, Homo sapiens
  misc_feature 158: n = A,T,C or G
gacaagctgtgaaatgcctagattccagagcaacagactgtgatccattcccaacaacccctccctaccgtctgccaccagttcccttaaagcaggaatcagagctagactgactcaactaagaattgttttggagaacttggaactcaacattccanaaagcaagaagcttgacatagcatcgatgagcccaagtcaactatatgaacaaaacaatgtctcaggaggggcagggtatcacgtcagaagaatcctgagtccttagatgaccttgtagaaaagagccacaaacttactctgggctaccttcatacctctgaactattatgcagagagaaataaatg

SEQ ID NO: 96 - DNA, 256 bp, Homo sapiens
ttcatctggctctccatgaatgtcctgcttttctggaaaaccttcttgctgtataaccaagggccagagtatcactacctccaccagatgttgggggaactgtcttgaaacctatacatttcagatgggcacccagagagtaagacctcacctcgcccctcaagttgcttacaatataatggaaaaaccaacaaataaataattataattcaataaacaagaaaaggtttcttctaataaacacatgaggtctgat

SEQ ID NO: 97 - DNA, 241 bp, Homo sapiens
  misc_feature 224: n = A,T,C or G
agacactgctagcagtcacctagaggacgctgcatcccagtcctggccatctcctctgggtcgctggcctgtgcgcccaaccacagaaggccgagggctgctgcttcctggggaaggattctgggaatgatgagtacctcttgcttcatgacaataagacaaagaagaattttgggaaactgtgtctggggaaacaaagaaaaaataaaattatcctttagtanaaacagaaaaaaaaggc

SEQ ID NO: 98 - DNA, 262 bp, Homo sapiens
  misc_feature 2, 7, 10, 13, 66: n = A,T,C or G
gngtttngcnaantccagcctgggaaagctggcagaggatgcaccgtgttttactcacctgagtgnttacaatgctcgtgaggtgcctccctgatagtacagaggaatgaagaaggaataaacagaccttctggataattgcatcagccttccccactattccaatgccatgctaacatttcaagtagtgtcccttttgtcttgccgagaaaaaatcatttcatgatttattacactggattaaaggctatgcacactctgg

SEQ ID NO: 99 - DNA, 155 bp, Homo sapiens
gtgctatccaacatggacgtctaatctttatgtaatttcttggagaagaaacacctatcagttggagagtgtgtaaccactgcagaggaactcctacgctggaatacaagcataggccaaaacctttcttgctcagtaaaactcaatgtagttag

SEQ ID NO: 100 - DNA, 242 bp, Homo sapiens
gccagctacctgaggaagtccaactaccctgaaaccaccatgctatgagggcgcccaaacctgccaggtagaaaggccacgtggagaagcactgaggtaccagacatgtgagaaaagatgtcttggaccttccagcccagccccggcaccaactgaacacagggaccagccaacaccccatggaacagaattgaactagtcaactcatggaatcttaagaaacaataaattgttgttatttt

SEQ ID NO: 101 - DNA, 54 bp, Homo sapiens
gaatggaaactgaaagtggaaatcaggaaaaggtaatggaagaagaaagcactg

SEQ ID NO: 102 - DNA, 270 bp, Homo sapiens
  misc_feature 14, 16, 42, 46, 47, 51, 70, 86, 98, 103, 134, 154, 172, 190: n = A,T,C or G
gtgaaaactgaggnanagagatggacgtgcaggatagaaggngatnnatcnaaggacacactgctggctntaggccgagttgcagntaaaatgaaganctccngattcctggcctcatccctttctccttttgnatgtgatttacatacaaatntatatagaaaaccaaganaagttttattttaaaagnactatccttactatgtgtgacaaactaacattttctattgttcttttatgaattactagtcacaactcattaaatccatt

SEQ ID NO: 103 - DNA, 287 bp, Homo sapiens
  misc_feature 4, 6, 12, 25, 44: n = A,T,C or G
gcanancacagnatggtgacactgncctgcttcatgaacacagnaaatgttgctgagagatcatggcattttctctcctgctgagactaagctgggcttctaaaccttaagagaacactccaggaaacttcatctaattgggtttactgtcttggaatcagatgattattaaaatgcttccaattgtatgtagtatatatgatgtagtatactacatggttgtgcattatagttaattacatacacacatattttggctgtcaaaagattataaattcctatagact

SEQ ID NO: 104 - DNA, 535 bp, Homo sapiens
tttttcataaaggaaagcagcatgctgtatagatgagagaagacatccaaaggaagaagatgcaagccgaaaaaaattcaagcctcccatggcgctttcagaacataccgcagatctcatgtggcacagcccccagcctgctttaaaagagcccatagaagagaaatcagttgctgcttgttgtgtctgggagaataactaatctcaggactcttgttcaggtgtcctcttgatggtggcggcccacactcctgaccagagccaatgaagaagagggcagagcagaggggagaggggctcaggagtaaggctgcaggaagcaaaggaagtgtcaactcaagagccacaaacaacatcagctgtgcacctggcaaagagcctgtgaatccttcagaattgctattactaaaggcatccttacagtcaagtctttgaacaatttttcagatttatgtcatatgaaaccatgggacagacataaaccaaattgtaaaaaataagtaaataaaacaacaaaggctttaagagattttgc

SEQ ID NO: 105 - DNA, 381 bp, Homo sapiens
  misc_feature 37, 125, 146, 270, 273, 344, 348: n = A,T,C or G
ttcctaggcccagatgtccaccctccttcacgagctnagaattgagctcgtatcgccaacatgttttgcggaaatgctcatatcaacacttggtgaaccaggaagactgtaccctcattcctttntcctgctgcctgctaggttgngttagaaagcttactctcgagttttactggcttgcttgtgctttttggcattttcaaaattttgtacaatgatcttcaaaaagcaaaaatacattaatttttttaaaggtaggatccatatganatnggatcttcatcttctaacactttggagaacagaaaagtggtatttggagatataatcttcataagaattgnggcncctaataaaagagccctggaagaggaaagaaac

SEQ ID NO: 106 - DNA, 177 bp, Homo sapiens
  misc_feature 69, 72, 86, 111: n = A,T,C or G
cagaaactgaggtacacagaagaaaggccatgtgaggacacagcgagaagcaagtatctgcaagtcaanaanaaagggcttaaaanaaccccacccttgccgcaactttgntctttgctttctgggccttccagaaactggtggaaaagaagtaaaaattctggttggtttaagccc

SEQ ID NO: 107 - DNA, 245 bp, Homo sapiens
  misc_feature 20, 28, 42, 43, 48, 111, 190, 208: n = A,T,C or G
ggggagctcctgcattaagncaaaactnacaaaggttggggnnaaacnctccactcctgctttcataccatttgaagttcagaccagtgagatttccatcagttgggagtngaagatgccacaaggacaagaactgaggatggtttgctcagagctgatttttagacaccattttccagggatccctggngacagaggagcatttttnttgtggttgagttctgaattaaaaagtgtcgtactat

SEQ ID NO: 108 - DNA, 195 bp, Homo sapiens
gaatttgccgcaccccagggattggacccaggtcacaaccaaggaagctgcacaagatctgaagtgttagccatctcctctcaaccaaatgcatgtgctgagtcctcatatgctggggttcttgcaaataacttccatgtagaataaaatgcttattaaagggtcagtaataaaatgtgctgttttgaagcgtac

SEQ ID NO: 109 - DNA, 160 bp, Homo sapiens
gaaagaaaaataaacatagtcatcagcactatgaaggattccaggaagtttgacatcagagaatttctcaactctaaaatgctggaaacccctgccctcacgctggaggccgttttgatgtccccttgttacttttgagtaaatggaaacatcttttcac

SEQ ID NO: 110 - DNA, 155 bp, Homo sapiens
gaagctcttgtttgaccttctgaaaaaaatcttgaagtatctatgagaacagctattatatgaagcagagattataatagatatggagtttaagttgcagaagaagaagactgaattattaaatgggacatcagaaaataaaagtctttcctttt

SEQ ID NO: 111 - DNA, 346 bp, Homo sapiens
atttcagaggaagttgtctaagatggtgccaggtcaccagaggtgccaatgcaggacacaggcaatgccgtcaaggttgtatccggtgaggatgaccacaagcaagccaggctcatagcctaaaggatacacctgaacgtgttcgctgtgaggaatgggccagaggattatgtgatgtttcatattttttccttgggactttcagatttttccaagttttctgccctgagatgcattactgaacttctgtttttcctcttactacactgtgaagtaaatgtgtgtgatgagtcactggcctttgccaggctgtgatcttcccaagaatgaagtccctatttaattc

SEQ ID NO: 112 - DNA, 275 bp, Homo sapiens
gtgatgtgacccagcctgtggcttccactgccatccacacacgtcgctgcctctctccacatcagcatcgcaactatctcctggaagctttccaagtgctgaactacagtaacctcagccgaactgctgttcattcaccccacaggcttgcccctcctctgcatctttgtgagaacctgagagtcatcctaaactcctccttccacctcactccccacatcaaatcgattaccaacttgtgctgattttatcttcaaatactctccagaattgtc

SEQ ID NO: 113 - DNA, 205 bp, Homo sapiens
gaggagaaaagagaaaggaaccctcccattcatccttccgtatcactactcagaaccaagtacctctgcttctaaactacatcagggagtgcaactcccatggaatcacaggacaagaagaaatgggaacagatatttaagttaaatgatggcaaagaaatttggaaaaggtaaaaagtcagagaaagagaaaacaatggtggac

SEQ ID NO: 114 - DNA, 487 bp, Homo sapiens
  misc_feature 427, 456, 461, 471: n = A,T,C or G
gcaggtcagctgggaaaaggcgaagggatcctgagacaatggtggattgctccgaacaggagcagcctgttcgggccgagctccggttccctccgagagcggtttgcaaatttctcctaatgtgggagactggtgcaccaggccaagtggcccccactgccccttctcaaggcactgtgaaaccaaatggaatttgccacgaaagtggctcccgggggccttgagaagggatcagctgaggaagctgcaaagctggtaacaggagggcacaggccgtgggtggcgaacaagcaactgcttgtctctgcagagtgatgccggctcaaaatcgaaccactggggcttcaaaaataaaccaacgctgcctgaaaacacaacttgcagaaaaagaattgttcttgaaatttctattgtgaacttttagggnaccaaacttttgaaaaatccaagtttttntgcantttggccaancaagggggcatgaccg

SEQ ID NO: 115 - DNA, 251 bp, Homo sapiens
actgagggatgtcaagcaggtccccagaagaaaagagatggcatgcaatgtaaagaagacggctggagctgaatcagccatctttgactatggtgttgctctgagaatgggatttgcacaaggctaagtaacatcatagaagtagcccaggtgcctgaggacttcaaacacccaagcctccactacagcctcaatttccttccttacattgtttatgtgagaaagcaataaacttctattttggttaatgc

SEQ ID NO: 116 - DNA, 139 bp, Homo sapiens
  misc_feature 2, 7, 22, 33, 34, 82, 85, 89, 107, 116: n = A,T,C or G
gngaggncacagcaatcctccngaggatgcagnngcaagacaccatcttggaagcagagcagccctgaccagacaccagatnggncagnccattgatcttagacttnccagccttnagaactatgaaaaataaattgtt

SEQ ID NO: 117 - DNA, 489 bp, Homo sapiens
tagacgactggtctttgctggcccaaactctcaaccttgccaagacaacaatggcagatgtttccatattggagaggcagctggggaaggggatggaaggcaagaagaaatgatagataaattggtctatagtcaagtaaattgccactgtagagacaagagatacaacttgtaacacagctggcctggactgacagaagattcagtaacaatataaaatagcaggaatgatggagctgtaactttgtgtgattcctcaacatctacctggaataatcaaccatcttcaggattgcaagccccaccactcctgtgttgctttataatcaaaatgacacacttgggcagtttctccaactgcctgataaattcagttttcaaatactaaggtactatatggcatggtgactttaccattactccagggtgggaagtgactttccactgtttgcggattaccaaagggaataaagcatatttgacagtccc

SEQ ID NO: 118 - DNA, 614 bp, Homo sapiens
gataaagaaagttcctctgagattaagactgagaaaggtcttaaaagccaagactccaaatggcatcaggaaacccaggctcttcgaaatatgcagtgaaaaatgaaacccttgcaagatgagacatttgataaagaagaaaacatcaaattttcttgaagctttcctctcactgtaactctgcctccttggattgaagctacagagaagaatgcagcctgcgggtgctcatgcctgagcatcatctcctcttttccacctgctgagctatgtctaaatagacatcctctacctttggcccaaaactttctgttcctgaatagaaagaacattcttgtcatatcaagagttctgggatattctgggagcagtttagagctttcaatcagtataaagtttcttttctcatgaaaagatcttgccacaggggatgagaaacaagctattgagcatctaatatatgtgtataccatgctaatcaattgtcatacttcaagtctatttaattaacagaaacaccctccaaggaagtcttatcccccctcaattaagtagattaaaaataaaccgtcttgggagaagataaggtgactgagcttataagaagagcccat

SEQ ID NO: 119 - DNA, 134 bp, Homo sapiens
gtagagaaatggagccacagatcaaggtcacccagtgagtgagaagcaaagtctggagctgaggcaagtttttcaaattcctcatccaaggctttctcttggaaagcccaaagcttattaaatccttaaagggc

SEQ ID NO: 120 - DNA, 181 bp, Homo sapiens
caaaatgacatgaatgactgaaaaagcatgtggagcacaagactcaagaactaagtgaaaggactcacacttcctgatttcaagtaaagctacagcaatcgagacgtggcattgatgtaagaatagacacatcaatgaatgaaacagaatacatcttccagaaataaattcacacaaatat

SEQ ID NO: 121 - DNA, 182 bp, Homo sapiens
gcttttccaaaatgtgaggcatatggaaaattcaggcaacaccctgttacttactcatcacttaagccatgttttggctcagaagataccaagcaaagctgaatattactgtatttcagaaaggggagtatttcttcagtgctcatcttgggggtcttcataaaaaatgattgacagctgac

SEQ ID NO: 122 - DNA, 424 bp, Homo sapiens
gtgtaatttctcagaataattttactctctgatgaaaggagggaataaggtaacgagatgttccctccctcccttctcacattggaccttgtgtgaggacgggacactggagctgctgtggccacctggaccaagagaatcaaggaggagctgacccaaaccctgatgctgcaaagccattggccagcgctggcattgtccgcctctggagtccttgttacaagagaattataaactcctgttgttgagactttgagaccccatggcggagacggagggtccttccactgcagcacaaagtggggcacttgcagtcacatcgcctgtgttcacggtggagcggatctactgcccttgtagggctgatgcattgcaaggggctgaacctcctgcactgtctcctcttggtgtatggagaaggaca

SEQ ID NO: 123 - DNA, 197 bp, Homo sapiens
  misc_feature 44, 45, 48, 126, 129, 132, 141, 152, 159, 181, 182: n = A,T,C or G
tgcggaaatgctctatatcaacacttggcgaaccacggaagacnngcnccctaattccttttctcctgctgtctgctaggttgagttagaaagcttactcttcgagatactactcggctcgctatntgnttnttgccattnttcaaaatttnggtacanattgattcttcaataaaagctnnaacatacaattaaat

SEQ ID NO: 124 - DNA, 146 bp, Homo sapiens
  misc_feature 86, 103, 113: n = A,T,C or G
atgacaactggagtctggaagtacagggaaggagaaaagcccagcgcatttctgaaaaggggaaggagcatggccctgcagctttntctagatcctggttctncagcatgganggaaaaacatctcatccaatcaaaatgcaagcc

SEQ ID NO: 125 - DNA, 229 bp, Homo sapiens
  misc_feature 9, 11, 15, 175: n = A,T,C or G
gaaacgacnangccnaatagaaaattttctaaacccccatgaagctagaaaacatggattagtatgagatgagaaaaccaaggctaagagaggacaggagtatctcttctctacacaaagccacttgagcccatttgaaatgtaacttttgccatggaagaattctaccaacacntttgtcgtcatttaaactacccactaaataccttttctattttttatactattt

SEQ ID NO: 126 - DNA, 500 bp, Homo sapiens
  misc_feature 1: n = A,T,C or G
ngcggtgctccaggtgtgaatggagacgacttcgagctcactgtgctgagaaactgcttttcagagggcttctacagagcccacagctcatcttctagaagtcatctatagctactgtcagtttctaggcttccaaggacacccttcagcctactgcaatgcagcttcttaccctactcctccatggacagatgacatccatttctgaaatccaggggccacacttcaatctatctcatgaggtatctctgcttggtggacaccgatgttctcccttcctgaagactctgcttctctgacttctgtgagcatagcctcttctggtcactcgttctctggcatagacttcttctctgtgggctggtagcgaacagtggggccttcagcatcattattgctcaggtcagtacaaaggaccacataagggagtatgatagtgaggagccaagatcactccatatctcgagaagagatgatagcagcctggaatggtttggtgc

SEQ ID NO: 127 - DNA, 167 bp, Homo sapiens
  misc_feature 16: n = A,T,C or G
actgaggtggatgcgnccatcttggaagccatgttaaagaaggcagagccacaagatagatgcagccgggttctctaaatcaccactggggagaaacccacacaccaatgaggaatacccattttttggattttaagagcaagaaataaacttcaattgtgttcagc

SEQ ID NO: 128 - DNA, 63 bp, Homo sapiens
accttcgggcaaggaccttcacaagggatgcagtacatgctgttgaagaagaaaaaaaaaaat

SEQ ID NO: 129 - DNA, 340 bp, Homo sapiens
cccaagctgttggccaaggagcttcttgaccttgtggcttctcacttcaatctgaaggaaaaggagtactttggaatagcattcacagatgaaacgggacacttaaactggcttcagctagatcgaagagtattggaacatgacttccctaaaaagtcaggacccgtggttttatacttttgtgtcagaggggatgccacttgaatctcgtgaaacctgggtagtttatcccaaataggagtggtcgaaacccagcagcaaaccacaggcccatctgcatttcctgccaagggaggatacagcttaataacatttcagaaacaataggcatttttctgtc

SEQ ID NO: 130 - DNA, 594 bp, Homo sapiens
ggaaacagaagactttaaaaaaagaaaggaagaaagaaaaagaaaccaccaactctgcaaagttctctggaatctgagaagtcaagcagggcttctgccttgttcatggtgagcctaaactgtgatttcgtctctagacatgacacatcaggcatgcctggatctggtttttctgccaagccttctgacagtaacgcaggcatttgctagtgtatatggaggaaggctgacttgaagtccccagtacatttcacccagtgagaagaggacaacactgactccagaaagccttttgctgacctgctctttgaaaccagtgtgcctgccaggaatcctcgccctgtgccccgcctacactcatccccacctaccttgtccactctgccgcacagcttcagtcaggtcctcatccctttcttcacttcattaccactaaagaaagcctcctcctgggtccccatgctccagtctggctcccttccgatgcatctcccctgcagctgtcagtcattggtctaaaatgcaaatctgaccatgccactctgcttaaaactcttcaatgactatgctaacattaaagatgaagcagattcc

SEQ ID NO: 131 - DNA, 152 bp, Homo sapiens
gctcataggtggaaggacttgccttgagtctcagaagagactttggacttttgagtgatgctggaatgaggtttgtcaaagatcagcattcttatacaccaacaacagacagagagccaaatcatgagtgaactcccattcacagttgcttc

SEQ ID NO: 132 - DNA, 265 bp, Homo sapiens
cttccaaagttaaatgagatgccagtcacaattcaggatgccagaggctggcagacttctccaagatggaaaaatgaacatttatcaagcacctgctttgtacacagatgcttactcaggcaaatgcgtcacagtgaagcactcacagacatgtacagtcctccaggaaggtctttccttaccttgaacaaattcagatccttgccgttccaactgtttccgtagcttctcatttgttttaatagattcttctaaacgctttctc

SEQ ID NO: 133 - DNA, 374 bp, Homo sapiens
ttgatagcaatgtagaaacagatatttagaactggagaagcactgctagtctggtacatgactgagatggaacagaacaagaaaattatacaaagcagtcagaagaacctgaagaataaaatcagctggagctactcgtctcagggaaagcggccttggctccctcgccccgagctgccctaggaagcacgttggactgagaggaggcagcaccttgacctcctgtgcatgctcagggccctgcatcagagccttccttccctccactctttcttccctttttctggctttcttctctttctcatcctataaagaaagtaaggtaacttactaaattacatacaatcaaataaagtttaaaacatagccaggag

SEQ ID NO: 134 - DNA, 496 bp, Homo sapiens
  misc_feature 24, 278, 403: n = A,T,C or G
atgagaaaacaggctgggcaaggngaaatgacaacaaaaccgtactgtaacaaagctgcctaacccacctgcaaatctacaattgagaaatccatttctgttgcccctgagatttgtggggtgtttgttaagtagcaaaagctgactgatacaagattcaaactcaagtttctttgattctgtctgcatcaccatgctgtctcactgaacttacagccctgattcctgttcctgattcccaagtgtcctgtcctaaaaggagcagagataaatattgnattcatccattttctgatgttataacagaatcccacactgttggtgttctgagtatactgacattccttgacgctagattttatattggtgattgcttggttatcatctctctcctctatgagantagaggattttctctttattcactttattcatttatatccataccacctggatcaggttctggcacataataaatgctcaatggataaaaaag

SEQ ID NO: 135 - DNA, 197 bp, Homo sapiens
atggagaaactgagacgcaggaggattaagcacttcccgaggtcacaacagtgaatgttggagctgggatgtgaacctgagcagtctggctgaagagtctgctgtattcaccacacagacgctctacttttctgacatccctcttagagccacaaagatgccattccttgccctcaggaatgctcaaggttcccccc

SEQ ID NO: 136 - DNA, 209 bp, Homo sapiens
  misc_feature 97: n = A,T,C or G
gaaacaaaatcttcagacttgcttccaaaggagaagtttgaaatggaagggagaaagagaggaagggagggacggcaagaaggaaagaagagagganggaagaaagcaatggcatgcccatgtttctgtgttgttttttcctactacaaaatattaagatattggataataaaggagccaaatagtgtcacatggctcacgtgtgtatc

SEQ ID NO: 137 - DNA, 135 bp, Homo sapiens
gcttatctccctttgtgtttcttggagattaacctgatgttactctgagaaggctctgtatgttgccaagttttgaactctactgaacggaaccaaaaataaaagtctaagaccaaagttgcaaaaaaaaaaagg

SEQ ID NO: 138 - DNA, 461 bp, Homo sapiens
  misc_feature 394, 439: n = A,T,C or G
gtctcagtttgcttcatctctggaatggagatggtttcctatgtgatcatgaaaatttctcccagctctgaagaccttttattttgtaagaatcattgtgaaggtatgggcttggcaaatgaatggaaagatgagcaatgggagaggaaagaattgaagggggctgtgaggtttgaagaatggcatcccccatgaagtggcgctgaaagatcacgatagcacagttccgtgatgtgaaataccacaagtctgcaatttttcggtcttgagagtgtcgctgggctgagaggatggaaatctttcagtaattataccagtttgtattcgtctcacatttgggaccaaatacaaatccgatccactctttctccctgtgaatattcataaaaaaccnaagtgccaatttctggtctaatcatgtatggaaccaaatatgttnatgaagcctaagtatatactgg

SEQ ID NO: 139 - DNA, 279 bp, Homo sapiens
  misc_feature 16, 31, 35: n = A,T,C or G
gcattaagctagaacntgaggaaagagacangctntggcctgaactcaaaacttagaagacatgagacacagagagggaatgaaagccacagagagagaaaatgaatctcaagaggaggacaggactgtaataagcgacatcatgaagttagaatcttccagcagaagactgaaatactgtaactgacagtaactgaccatctggaacactataaatgtcttctttacttcttactttgtttatttgtttgcttgcttgctttaaaaaaaaaaagtaaa

SEQ ID NO: 140 - DNA, 249 bp, Homo sapiens
  misc_feature 2: n = A,T,C or G
gngatgacctcaagaggactcctgaattaatgtctgtacagtaacttctcagagtctggttaccagtttcctcagctcttccggcacatggaccatgatggctgcccccagatggtgccttcagctccccagtcaccatcactgtggtatatgctgttggtatctcaccccgatgcctttactgggctgatgtccttatcttgcagctgctgtgggtgtcagttaataacagctcatatgtgtaccctt

SEQ ID NO: 141 - DNA, 593 bp, Homo sapiens
  misc_feature 486: n = A,T,C or G
gtgtttttcaacgaagtgctaaatttttcctggctgattccaagaggaaaccttcaggtacatatgtgagtctccccaccactagaactcttaagtggctgctgttatggaaggtcaggctcataatcactgcatattaagtccttaacagcaatgtctggctcttcattaatctgtaaacttactgatttaccgagagatgtctttgtttttctcggcgttttttcatctacttctcaccctggtgccaacgcaatttccagaaaatgaaacaatgattagtttatgctattgcatattaagtttggttttctctgtatttacattgcatgtttcaaaggttgacttaatcagctgtgagttgttatgcagttagtcagagtggaattcccacagattttttcccccaatgtatcacataacaataagagagctagacacaccttgtgtagttttaacaagtcttcgcagttttacttaatttgnttcccttcccttttacccctgaggctcccaaagcaaatgaaccattcaggagcataaaacaaggggaattagtttagacttcaataaaacacagacctcttgcttgc

SEQ ID NO: 142 - DNA, 206 bp, Homo sapiens
tgaagagaatgggagatgcaacatgaggtcctggagcaggcagactttggaagctgacaaccctgagcttgcctttggggtctgtgagtttgtggagaaagactctccatctctgatcctctggtgtttcctctcctgtaaaaagggaaccgtggtgcctctctcgaaagccaatttcaagcactgaaataaaccaatgggcttag

SEQ ID NO: 143 - DNA, 34 bp, Homo sapiens
tgagccgagattgtgccactgcactccagcctgg

SEQ ID NO: 144 - DNA, 290 bp, Homo sapiens
  misc_feature 10, 53, 68, 74, 79, 117, 121, 126, 132, 140, 149, 153, 178,218, 222, 228, 238, 269: n = A,T,C or G
ccggcacacnaacaagctgcttgggagtcaagaggaagacatcggcagaagancacacagcggctggncatcgngaggncattgggaggagcacaccagcagaagaacacaccagcngacnctggnaagtcnacccgcanaacaacggnaagnttggccagggtagttggaggacagnccagccgctgggtggcccaactccaggggaaaaccaccancttnccactncatccccgtnctgtcctccccatccaccttgctgagagctncttccactcaataaaaccttg

SEQ ID NO: 145 - DNA, 189 bp, Homo sapiens
  misc_feature 94: n = A,T,C or G
tgatgaagaatgattttatacaatgaaagaaacaagtcattgttttcttcatccatggcaatattctccctgtctttcaagaaagattgaaaangtctttcagattgtagtaatttgaaaagttgtaaaagattgtaaaatagaggcatatttatcagatttgggggaataaattttttttgaaaaagc

SEQ ID NO: 146 - DNA, 570 bp, Homo sapiens
  misc_feature 20, 21, 85, 91, 131, 147, 154, 219, 253, 291, 294, 330, 332,354, 398, 417, 479, 483, 498, 501, 503, 507, 547, 555: n = A,T,C or G
tgaagggtcaaagccaattnnagaaattttttcaagggctttgtaaaaaaaaagtgggaatttttgggaaacccaaggtctttcngccttnagggggggaagcatcttgttgggaaggttccttaaggttnatttgggatccctcanttccaanagaagggggccctggctccaatacccccagaaagggaaaggggaaaatgcttgccaccaggaggnagggccccaaataaaggaaattcttaaggaacangggggcttgggcttcaagtatttccccccgggcccctngtngaagccaattttagaattcaaccccccctttttttngntcccaaaatcaacctttttttnttaccaccaagcctgggtccccattaccttttcaaaaacccctnggattcaatttaaaaaaantggggggccaggcggggccttcttgggaattctttttggggggtcctttcaattttcttggnaaangtcctccccaattgngtnancaantaacaaaaccttctttggaatcaaaaaaaaaaccaatttnggggaatnggccctttttccctt

SEQ ID NO: 147 - DNA, 770 bp, Homo sapiens
  misc_feature 17, 93, 262, 328, 350, 410, 435, 450, 467, 469, 484, 512,514, 561, 580, 601, 628, 636, 662, 676, 679, 687, 697, 702,706, 733, 739, 757: n = A,T,C or G
tcctgtggaacaggttngcacacacagggaaatctcaaccatttatgaaataaacctgcaagcagggattggaccacccggggatcctctttntctccctcccaaatgccttgcaggtgggatatcttggggactaccattatgccagtgggggaaggaagcttgggaaggggaagcctggtttaccaaaaccctcaagcccatttaagccatcccccaagctcttgttcttttttggaggaaaaggaatggacctggaagnaaggggaaaagggtggggtattttggaggaaaaaaaccaaaaaagccattcccaagcccttttgtngaaaaggcctggaagccccttnaaaggggtccccccttcttcccaagcccccttgggcttggaccccccaggaaccccttcngtttttcttttcttcttgggcattnccaaactttccaaangggaatttggggccctngnttttccccctttttnaaccttaattaggcctaacccaacttcnangctttcaactttcgccttggaaaagaaaagggcaaggaagccccaancggccctttccttgggggnaccaaggttttccccttttcnggctttacccttaaaaggggcaaaggncggaaatnggaagttctttttttttcaattcggnaaaatgggaggctnggnaatttttnccccttcacnttatngggnaacaaaaccaagggggggcctttaaancaaaanttttaaattaaaaaatantggcctccaaccg

SEQ ID NO: 148 - DNA, 449 bp, Homo sapiens
gaacaaagattgattctctggcacacaggtttcagacaagcaactgttggattagagcatacagggacatatattgtcctactgccccctgtggttagtacgatttgtctgactagctagttattaatagttgtccccttctcctaccacttcaagcccacttcaaccagctccttccaaatgctcaagagaagacttcagaagaaattcaaagttttcaaaatgatgttggattgaaagttctgatgatgttctataaaccaagagtttgcaaactgtggccaaatcctgctcaccctctgattgtgtatagccccaagctaagaatggtttttacattttaaagtagctggaaaatatcaaaagaagagtaataatatttttgtgacacatgaaaattcatgaaaattcaaacttcagtgtcccgtaaataaagcttactgaaacag

SEQ ID NO: 149 - DNA, 256 bp, Homo sapiens
gaaagtagtagatcatccaaaaaggcgatttggtatccccatggatcggattggtagaaaccggctttcaaattccagaggctaattgactccaattatgcaacttccttgggtgaaatgtcacagcaatatggaagatgcttcactgaagttattcacacttcttaatgattaaacttttaaggaactgaccttctgcaaatcctttccaaagcttgaacttcagtccatcacattacagcattgttacagcttc

SEQ ID NO: 150 - DNA, 393 bp, Homo sapiens
ggaatctcatcaaacaaccagggaggatcaaccaccagagaaaagaagagactgggagtcatcaccatgtccccaacagaattttcatctatccttctgaggacagttccaagtgattacctagaggactttgcttcataataagtcaaccttcattcctgtgcagccccacctctcaccttcccaaaatgtctgcctcccatcttctgggtccattcattctctcaaatgatttgctgcccctcaaaagaattttccacgttcctcatctctcccctcccctgggaaaaagcatatataagcttctataccaccctgggttattgggtaatcattctccagcaattctcccatcctgtgcacatcaaataaattctgtatgcgttttctttt

SEQ ID NO: 151 - DNA, 488 bp, Homo sapiens
  misc_feature 398, 426, 429, 443, 452, 454: n = A,T,C or G
aaattagttgataacgtcttccaggagacctacggccatcctactgatatgaaccagatcatacctgccctgatgggatgccagagaaagactgctgcaaggtacgcgccactcacagacctctccatttatctcactgatgcaaaggaccctgagtagggatcctctggaaacagaacagagggaagaagataccttccctgaagcccagatgttccagaagcctgcgcctcattcacaaagtcaccccaaaaatgccctagagtttggagttttgaagaagcgggaagaaggcctgagtaagggcctgggaaccaagttagatcctacttcagcatcagcacatgccagcgatggtgcacacaggtggagagcggcctgcccgtcttttccatggngcccacagacccatttaggatgaaagancanaaaatttttttccntgtaccggntntggaaccaggggaaatttatatttggggcccttg

SEQ ID NO: 152 - DNA, 443 bp, Homo sapiens
  misc_feature 413: n = A,T,C or G
atcctattgtctccatcaaaggaaaataagcaaactgaagtgctagcccaccagctctgtccagtcccaacaagcaagggccttcctctgatgtcagagacctcaggttgcaagaaatgcgaagggattcgaaggggcatgctacaacctaaatggaattcctttaaaaagcactgtgcagcagaaaagacaagtatagtggctatttaatcatcttcactatgaagtgccaattctttagagtcttatgacattcatgaatgatgcaggaggcggacatgatgaatgcagagcaattccctgcgacagatactttcagggaatttatgccccctcccccaagaacaaaagggctcctgggctcagttatcatttgttctgcgagagaatttacagtcttttcagcaacttcntttaccctactcataaagcgcttattttga

SEQ ID NO: 153 - DNA, 290 bp, Homo sapiens
  misc_feature 230, 232, 238, 246, 248, 250, 254, 260, 269, 271, 275: n = A,T,C or G
atttgcgaagagtgggaaagtgagcattgagcatactggaaataccaaacgcagacgccctgggatgagggtccgcttggcgagcccagcaagagcaataaggcctgagtggtggaagtggggtatgcaagaacgtatcattcttgttgcttttacctgctgcttaataacacgcatgtactgtctggcaggaaataaagagattacgtttcaaaaaaaaaagggccagngnggccanttcagttngnanttanccaggntgaacttgntnaaangggggggactaccca

SEQ ID NO: 154 - DNA, 508 bp, Homo sapiens
  misc_feature 397: n = A,T,C or G
ggtacctggcacaagtttctctggattaaggcatagaatggtgtggatgatatgccaaaaatctaggaactctctctcctccagctggaaagaagaagcatttattacctcacagtttctatgactaaagaatccgggagtggcttagctgggtgacctggatcacggtctctcaggacgctgcaatcaagatgttggctgaggccatggtcatctcaaggctcagtttggggaggatccacttctaatcaaaatcacaaggaaacctgatggcatggtacctagtttccccaagagcaagcaatccaagaggatgagacaaagaatttaagactgaagccacagtcttttatcatttcatcctgttagagttatcctatcagttttgaagtctcantggttttagaaccagtcagtaagtcacccacactcatatgagggataccaaggtataatgccggagcagattgtgaagcctctggagctgcttccatggctgtatgatctg

SEQ ID NO: 155 - DNA, 81 bp, Homo sapiens
  misc_feature 17, 30, 36, 39, 51, 58: n = A,T,C or G
agacgctggggagctcntgaataaaaaaanaactgngtnatgggacgcatngacccanaaagcagacctgggcccacaact

SEQ ID NO: 156 - DNA, 416 bp, Homo sapiens
gacgtttgaggctcctggcaatgaggatcttcctacaatgggtgcaacaaattcctgggccttccagaggttctggatgcaaattaagttgcttctcagcttcccccactgctggctgatggttgagatttcctgcatcttccagaagcaaaatatgctgaaattcaagaactgggcatgaatgactgtgtcactcgccagagctgagccacctccaagcagtgagccaggccaatcatgtgaggccctgccaccttcagacagtgtcctgtcccccttcaccaggaacaaacagaggacggcctgtcgcctctcagctccctgcctgcctcagactttcacatactctttatcaagttttacagagcttttctgactctgtaacaaacagtcaaataaaaatgctggtgttcccc

SEQ ID NO: 157 - DNA, 403 bp, Homo sapiens
cacattggatcaaataatatcagaagctctcccatctgtgatctgtctatagccttaccattagaagcctcaccagagccaggcagctgcagaagcctcttttaaaaatggtttagaatgatgactggacttggcagcaacttgctttggaagcaccaaacaaaaagtgctatctggtggttgatttgattaactgcaatctagacatccattttgtggaccgtattcacataagcaagcagctgcaatccaggcctctgtttggggttgctgagctgagccaagacattcactcttcaacaacaaaggcatgttgggagcagccaggagcagttctggcgcttgggagtgaaggaatgttctgcctaatgagtgccagatgaaataaaatctttgatatatt

SEQ ID NO: 158 - DNA, 104 bp, Homo sapiens
  misc_feature 2, 10, 12, 15, 22, 39, 53, 55, 62, 66, 69: n = A,T,C or G
gngcacattnanganccaaagncatgactgactccccgnatttcacacctcantnttaaagngganaantatctgaactaaaagctgaactcaacaatgaaaag

SEQ ID NO: 159 - DNA, 636 bp, Homo sapiens
  misc_feature 607, 623: n = A,T,C or G
gctgcggggcaccagctaaactctctgggaagtttgcaggaggcacagatacagccttaaccttgacgagtcttccatcagagacatttcaagatgcagtatgaaaactaaaaggctctgctctaacagaactttctgcccagccataacacaaagatatcaagaagaaaataacaaaatactgtcataagaaaatgtaacacaaataaagatacagtactccaaagtaccgaggatgccaattataacttaccaatataacttcaggataaactctgacatctcctttgtgcaggagctgctattaacatcaccaggaagctggagaccccctctccattgagcaagatgcaaatgtttaggggaaaggtgagaaaggaggatgtctctgcaggaacccaagtcaccatgctgtggtgtggtcaaaccagtgactctcaccatgtaggcagccagtggctgggggatggctgctgctggtgtgatgacccctcctcataaatttaaacttaaaagaccatctttgatggtcacaagctgtgtgatctctgctcaccaccttgttctgatcatttcccaagtgagaaccacgaataatatttcactnctatgatctttatatncaccaccaaggat

SEQ ID NO: 160 - DNA, 383 bp, Homo sapiens
  misc_feature 93: n = A,T,C or G
aggaactcaatttttattcagcactgactacttggcaagcatcattaaatgctgtatctcaatggattctctcattatagctgtccatactgnggaggtttacaggaaaattctacaaatgccaacaactggtcaaatatagctggatacattatctgcatgttttctggtcctacacaaatggcctataaaagcaaaataagaacattagaatgcataatctgaactccattaagttctttactgtgtatatatttgtttaaccacagaatcttaaaaactgtcttattttatgtattataccatcttttctgagccctaaaggacacaaactattttaaactgttatagaataaagtataggctgaaactgttaatcagct

SEQ ID NO: 161 - DNA, 162 bp, Homo sapiens
atgcaacgccaggagcagcatcagccacgctgtaaacaagggggaaacgccaagcgcattacagaggacgtcagccctgccatcactgggctggggaaacaatgccagctatggctggtctccgggttcacagtgataagggaaataaacccttatttgtct

SEQ ID NO: 162 - DNA, 276 bp, Homo sapiens
  misc_feature 6, 18, 50, 67, 73, 84, 92, 116, 125, 131, 137, 139, 148,152, 157, 177, 185, 200, 217, 221, 223, 262: n = A,T,C or G
caggcncacaaacaagcngctgggagtcaagaggaagacatcggcagaanaacacacagcggctggncatcgngaggacattgngaggagcncaccagcagaagaacacaccagcngacactggnaagtcnacccgnanaacaacggnaagnttggncagggtagttggaggacagnccagccgntgggtggcccaactncaggggaaaaccaccancttncnacttcatccccgttctgtcctccccatccaccttgctgngagctacttccact

SEQ ID NO: 163 - DNA, 284 bp, Homo sapiens
gtaccctacaaacatcatcagcccatcagctgtgtgccacaggaaggctgggaagcacggggtgtacagaaaacaagcaaggaagagaaaaggcactgaagcagaactggtgaatcaacagtgcctgttaaattggcaaatcctgaaacactcaacaagaaccttggctccagaggggacaacacaggtcataaaacttccagggccactgacctcattatgtgactacaaaggtttatcatttagtccaaaattgtggattaaaaataaattaaatgccatgt

SEQ ID NO: 164 - DNA, 209 bp, Homo sapiens
ataatgcaagttctgaagttctgaatgaaaaaaattaagtgatatttactattctacagcgacttgttgaggtgctaaggaaagccatgcgatgccacgcctggcaacaaacccacactgcttcaacttcctgtgaagaaagccctaccatgatccccacccacattatttattttgacgacccaaacaaataagaaaatgtagccagg

SEQ ID NO: 165 - DNA, 184 bp, Homo sapiens
cacttggcgctgctgacgtacagagcaagcaaagccgctgaagttcaaaacctgcactgaatctatctcaaacaaagaatgccaggacccactgcagtgacccctaggatgaagacatggaatctgttattatgcaatgtcacttaagtatgtcttttatattaataaaaaagttcgtcttggt

SEQ ID NO: 166 - DNA, 341 bp, Homo sapiens
  misc_feature 325, 327: n = A,T,C or G
gaaagaacatcaaggctcagggtggtgggactctacttccataagagcaatgatccattgggtgaccagcacggattgtcccacagcccccgatggaaacattcagaggtgaatgccttgctcagagccccctggccaggctgaggagggaaaaattctgctttccaactctggcaagaaattgctgcatccagaggctgcagaagcccacgaggagcatgaagatgcgtgggaagaataggcgctgccttgagtgacatcctgagccagacccttacacacacagctttcattgttggcttttgtgtttttttttttttttaangnaaaaaaaaaatccc

SEQ ID NO: 167 - DNA, 419 bp, Homo sapiens
  misc_feature 404: n = A,T,C or G
agtcctgcattaagtcgactgaggtggataatgaagtgaaaggaagcagaagagagtgttatagttggaaaggtgggaaatcaccccctccatgctgaagggaagatttcaggttccaaatgacacgtttccctcagaatgacttttgctgtagtgaccatggatatctttgctgtgttcctgaaactctgcagacagtcctaagggatccagtgggtcctctgatggaccccaatgctggaagtcacgcatatagctctgaagagttgtcacaagaaatggcgtttctggaggatgcacaggaaacttttcatttggcatgaaaaaggctattggatttgcaaagactgcagaggaagaagtttaaattcttgagccccctaaaaaaaaatttttaaaaaagnggcttccaacctttg

SEQ ID NO: 168 - DNA, 177 bp, Homo sapiens
agaactgagctgacatggacagaacttccagcaggaccttgaatgttaacgcattacagatgccagaacctctgtctacctaaggccctcagtgactttgtgaagcagagtctcacctccaggctggaaacatcctggactattacatgaacaagaaataaacttcactgtgctgct

SEQ ID NO: 169 - DNA, 439 bp, Homo sapiens
  misc_feature 311, 401: n = A,T,C or G
gatatgaacacgaagcaggcagaggatgaagctgatggtgtgcatggtcactgtgctcctgcccatttttgagcttctggaatacaagctgtgcctttgcctggaatgtccctcccagtctgactaggcatcttctgatggggtttgacctggttgcttctaacactaggatggacctcttggcaatctctggatatctttctgtggtttgttataatgggagaagaagaagcactcccatctagattgctgtatcagaatggactgttatgattgcaaatggcagaaacctaactcaatgcaactataanaatgagggaaatgtcttggcagctcttgaaatccatggaagaacaaaatgatccaggtgctggagggacagcaacagagctggacctcangtgctgctggagccagaggctcaattttcactagtctt

SEQ ID NO: 170 - DNA, 393 bp, Homo sapiens
  misc_feature 7, 13, 56, 60, 66, 68, 76, 144, 146: n = A,T,C or G
cttctgncacgtnccgggtcccagagtgtgcctgctcagatcccaaaaaacttgcnggancaggangnggtcacanagtggttaaggggaagggagaacaggaccggcgggtttctttaccgcgggtcaagaacccttgaaagncntcttcggcttcatgtaacgcaaacttggcccacattcacttttccccatgggcggccccaagtccgaacccagatgcctctccgacgacagccgcaaagcgtaaggcaggtcgttattccagcctctaagcgctttacagcgccagatggctcgcgcacgcgctgcgtcttagtataggtccttgttaatagttagaagtgctgttctcattgatataggaaaataaaactacttgtatgtcttatg

SEQ ID NO: 171 - DNA, 227 bp, Homo sapiens
  misc_feature 16, 20, 23, 25, 28, 37, 40, 45, 61, 72: n = A,T,C or G
caccctgaactagaangggnaangnaangtgccttgngantcacncggccacaacgaaaantagttgaggcncggcgccgggggcttcacgcttcttaatcccagcacttttgggaaggcccgagggtggggaaagaattggctttggaagcccttgaagtttcgaagaacccagcccttgaagccaaggaagtggaagaaacccgcccgttttcaaactagggggg

SEQ ID NO: 172 - DNA, 808 bp, Homo sapiens
  misc_feature 17, 21, 32, 35, 78, 172, 309, 570, 573, 590, 595, 600, 610,614, 622, 631, 656, 662, 664, 665, 666, 667, 668, 669, 677,679, 680, 685, 688, 691, 695, 696, 699, 707, 708, 711, 721,725, 744, 747, 752, 758, 760, 762, 765, 767, 770, 772: n = A,T,C or G
  misc_feature 773, 779, 789, 794, 795: n = A,T,C or G
gaccttctggggggagnctanctggcatttangtncagaacctgcccctttctttttaaaaaagaacaacttcaaagnatctgggcaaccacttgtgccccaaagctttcttcttaagggaaagaagaattggtcaaaagtgttgggtgccctgggacccagcaagcattangccatcaccttggggacccaagttaagaaaatggaagaatgcttcaaggcttccatcccaagaaccttgcttgggggcttggggggcccaaaccaatcttgtgtttttaacaagggcctcccttgtgttgactggtngatacgtggatgcttccaagggtaaattgggcccacttgaaagaaaagtaaaaaggaactgttctacaccttaaaagaaagccaaaggggacctcaaattacaggccattgcggtttacttggcattattatcaattttaaaaaatattcaaaaattaaatggggaaaggggaaataaaaacaccagggcttaaaaaggggatggaatttaaaaaaaaaaaagaagtttaaaaaaaaaaaaaaaaaaaaaaaaagggccangcngggggcccaatttcaanttttnggaantttaacccanggcnttgaaacntttggttcnaaaaaagggggggggggggaacctncccccnannnnnntcatcccncnntcacnatnttnttgnnacnttacttgnntcntctacattcntganctacaacattcatcttatntanttatntatccncntnacncnctnanntttttncacttatttncccanncttatatatatac

SEQ ID NO: 173 - DNA, 649 bp, Homo sapiens
  misc_feature 23, 26, 46, 50, 73, 86, 88, 131, 239, 272, 565, 566, 573,586, 590, 591, 598, 601, 605, 606, 608, 612, 618, 628: n = A,T,C or G
tttttaggtacaagaaccttganganttttttggacttggcttggncatngggccggtgccccttcttgggangaaagggcccttngnattggtggaatgggtggtccaacctttccacaaagtaccttcngggccaaaaaggagggggtgaccaaagtttcaaagctcaaaccaaaggtcaagaaacttaaaaggggagcctgcttgaccccgggggagcttgcccaactttcttggnggggaaaaaaggggaccaagaatggaaagcttncttttccaagaaaagcttgatggaagccaaccttgggaccagcaaacaagggggaccaaacggagggtgggacctttcccaaagaagtacttggtggtctttcctggtccttgcatcgcccattgatgttgttaaccgaaattctttttgaaaagggctttcccaagataaagcaagccccaagggaaagaaaaatgaaaaactcctcttgatgttgggtttggggggggggtcttgccaagcttggggggccctcccttgtcgccaagtgggggccacttttttttttttcnncctttgnttcttttaaaaancccnnctttggntgncttnnancaanggtttnaattaaaaanaattttttgggaaaagttttt

SEQ ID NO: 174 - DNA, 271 bp, Homo sapiens
  misc_feature 42, 54: n = A,T,C or G
tttcccggagtggggatatgaacagcccgtcttgggtcctgngggtggaagccnatgtgtggaagaatggagggcatcggttagaaaggagtctaagtccctgatgggcactgagctgcaagaaccagcctgggctgcttctgctggatgtcacttactagagagcgaaattaaatgtgcttcagctactgttactttgggttttctgtcatttgtagctgaaataatcctaatcaatatgagatatattaagtaaacaaaaatgcaaatg

SEQ ID NO: 175 - DNA, 272 bp, Homo sapiens
  misc_feature 12, 71, 84, 91, 94, 103, 111: n = A,T,C or G
caggaaactggnagggaaagaaagaactggccaagggggaccaaatctttggttggaaatcttggggccangaaaccccttaanggaggangantcctggaanttggaaancttaatggttatttaataaataaaattggtggtttaatctttcaaatcctgggggccatgggcaccacacaggggaaaccaatttctgggcctggaatggcttgcttcaaaggcttctccctcttttgggaataaaataaaatgggctttcaggttttttc

SEQ ID NO: 176 - DNA, 267 bp, Homo sapiens
gactgagctgcttggcctgcagaggaagcgggaagcagtcagatgcaaggcacccaggttagaattcaaatgctgcaggcaccggggtctgcatgacaggacggctcagtttacgctgtagctgaggaaactgaggcaaagaggacgaggaaagctgcccacaatcaccctgctatggcccaggactgcagttcagatcccaggacttccaggctggtgctttttccaccacggaaaatattaaagactaaataaactacaaacatt

SEQ ID NO: 177 - DNA, 332 bp, Homo sapiens
gcatgagcaccaatgactaaattggggaagaggaactcaaggggagaaggcagctcagaatcaaagattgaagaattgtatctatcttcaagttcactttctctgtcatctctattctgccgttgtgccatcagggtcaagcagcaagaagataaacagagaaaaaaaattaacagttattagccccaccctaatgaagccaaagagttccactgggaaagagcaactgaaagctctgcgtttgaaactctcctggactcagtctcatgtatctcccactttggctgatgacgatctatatcctttaactgtaataaacaaaccataactgt

SEQ ID NO: 178 - DNA, 908 bp, Homo sapiens
  misc_feature 58, 78, 85, 93, 721, 799, 822, 845, 859, 864: n = A,T,C or G
caggaaactggcagagggggagtctcactcttggtcgcccagggctgggaagtggcangtgggtggtcaataagccangcttcanccaacaancctcttggccttcttcaaaggttcaaaggccggaatttctttccggcaatcaagcccttccaagggcaaaaggaatggaaaacccaccaaaggaagaaaaggccaggaaaggggcaagaaaaggaaaggggaccaaaccttggcttattaaggaacttgggaatggttttgggttggtgccctttcaaaaaaattatgtttgaaagccttcaatcaccaagttgtggatgaccatttgggatgtggggggcccttttgggggaagggtggaaatgggttggatgaagaagtaaaaagccccgtattgaaatggaaaccgaaatccttgttccatgccattggaagatttatgacctttataaaaaagaagtttccttaagaagaggccatcctcatttcttccaccatgtggaaggtttaccaaattggaaaagataagcttgtctatgaaaccaagggaaaacaaggatcctcaccaagaacaccaagatcttgtaagggcacccttggatctttggacctccccaagctttcccacaaacgggtgggaagaaaatttctattgggtttaataaagccaagcccaggttggatgggcaattttaaatattaagcaagctttgggaantaggaacaagggacaaccaaaccttaagcaccaaaaaggttttcttaagggatgccttacttaaaaaggccaccgacntttaatggggaaaggtttaagtngcctcttaaaatggccataatanttaagttaaaaggnaaagnaaaaggaatggtgggaaaaatcaaatgggatcaagaacctccaa

SEQ ID NO: 179 - DNA, 274 bp, Homo sapiens
  misc_feature 23, 24, 54, 62, 83, 95, 106, 108, 111, 114, 117, 129, 137,159: n = A,T,C or G
ctgccgcctgccggacacacaanngtcctgtatgggggaagtggaccagggtcntattcaanccccttcccgtttattcggangaatggatggcnttaagtaccangncanccnttnggagggaaactngggcctcngggaaccaaaggtggaaccctngaagaactggggtggggctttcttaagaaaccaagccctttacccaaactggtaccctttcccctttctttggctcaagcccaaataaaattaatattcccttcttttcaacttc

SEQ ID NO: 180 - DNA, 526 bp, Homo sapiens
  misc_feature 35, 42, 54, 64, 69, 76, 78: n = A,T,C or G
gacgtctggggagctcctgcattaagtcagactgnggggctnctttggtggccngggctggggnccagngacgggntnacagcacacgggcggacctacctacacctcccggctcaagctatgctcctgcctcagccttcccagagttgggaggcgtgggatcaagtcctagattggtcattcctggctgtgtgactctgggcaagatactcagattctctgggccaccggtttcttgcatgttacaaaagcctggttacatttctcatatcaaggagatacaaagttgcttcaaactcctcagccacaggaactgtcttattcatttctgtatccccagcgtcctgacacacagtaggtgctcagtaaacgttgaatggatacaaacatgactgtgaagagccttgtaaacatcattaaccaaaatatgtctatatgtatatatgttagcacttactacaacaggcccataaacctttccaaaatgacatcaacaggaagtaaaacctgttttggatgtacccat

SEQ ID NO: 181 - DNA, 730 bp, Homo sapiens
  misc_feature 13, 26, 39, 44, 97, 625: n = A,T,C or G
cagcaactcgagnggagacgcaagcnctctcttcgggcnccggnaaaggaatttaaagtttccgtggaaatgccataccgccaaggaacttcggganggtaggtttcccgggtttcccgggcggtgggcccattttttcggtttgggtggggtggttcaagtttggtgggccgggtttggcttgggtcaagtaaaccaagcccaaagaatggcttgcgggaaatcttgctgggctctttccgtcaagattggggccaagaagggaccgaataaagccacttgctttcccgcagggcattttaaaaaaaataaaaggttcccgggaagaaagccaaaaaaaaacttgttcccaaggggagggatggatgaaaaattccacttgtatctaaaagggggtgggggggtaagcttgatgccctccttgtataagaagcccacccattggattcttacaagtttgggtggggaaacaagcatattgccatatattgaagcttgggcttgtgggctttcatttcccaaaggaaagccaagggaagttgacttcaagtcatcccaagccaaatccgcttgggttcaagttttcatttcaagctctcttatggggaccaagtaaatcttgganaaaaataaacccgaagctccttcttttggggggatcaaataatttatttggactttgtaagttaaacttgccacccaaataaaaagccaagtcttttacccatgg

SEQ ID NO: 182 - DNA, 622 bp, Homo sapiens
  misc_feature 557: n = A,T,C or G
caggaactggcagggcaatttctaaaccgggggaatgaacaattgggcaatcaatccctcaatcaaaccaagtacaatcggcaagaagaatgggtggcgggcaatggcccctgggaacgccccaaccaagcaagtcccaatcccccggcttggtcccttgggaagaatcccccttccaaaggggaagcaaccccaataatggaacggcccgcccaaagggacttccattcccttgcgccagggggccaaggggggcaattgttcacttggcccgaaagaccttgcgctaggggggggactcctcataagccctcaagccctttccctcgtttccaagggcctctccccaagggcttgccaatcaagccttctttacttttttgaagcctcttgatttccaaattcccttgctccttcccactccattaaaagaagggctaagggtggaagggccgctttctaagggtttgcttggggggctcttgcttgggttaaagggaaacaaggggaaagccttggaccaatctccctccactacctcttcccttgtgcttggntacacaagtgggtcatttgtttggatgttaaaattaaaaggtcaataattcttggcttctcttcc

SEQ ID NO: 183 - DNA, 412 bp, Homo sapiens
cacacaggacacggtggggatgcagcatcttggacctcatccgcctgtgctctaattcaaagacaaatatgtttcccaacctgcccaaggctctggcagggaaaactcagatccccaaactcaggtcgttctagtgcagcaataaccagctgggttttcagcaacttggatggagccatctgtgttcccagcccacataaaaatatgcacaagaagggtgcaaatcagcaagtccacagcttccagaggccccagctgggatgtgccctccctttggggactaatgaaagagcccaaggaagtcactgaaagctagatatagcaaaatggtagctcaacaccagatgcaattatttaataataaactctaaatttgtttgcccccttaataaaactctatattccaatattc

SEQ ID NO: 184 - DNA, 899 bp, Homo sapiens
  misc_feature 18, 22, 33, 42, 45, 63, 75, 90, 141, 181, 276, 422, 514,525, 530, 575, 617, 664, 665, 671, 705, 722, 730, 739, 754,771, 776, 779, 788, 793, 801, 822, 833, 843, 865, 866, 868,878: n = A,T,C or G
tacttcaaggggaccccncctncttgaacatcnaaaagggtnagnggaacgaagatcaccggngacttgaagacnggcggagccggctanaagccggggtacgagcccgtacttgcccgcttcttagaattttcttttgcntcctcttatgggggtaaggaagccgcaagcctctctttcngcccgggaaaaggatttaaagtttccgttgaaatgccattaccgccaaggactcgggagggtaagttcccgggttcccggccgtggccattttcngtttgggtgggtggttcaagtttggtgggccgggttgcttggttcaagtaacaagcccaaagatgcttgccgggaaatcttgcttggccttcttcggtcaaggatttgggggccaaggaagggaccgaataaaagcacttgctttncccgcaaggccatttttaaaaaaaataaaaagtttccgggaggaaagcaaaaaaacttgtttccaaggggaggggattgaatgaaaaaattnccaccttgtantcttnaaaagggggtgggggggtaagccttgaatgccccttcccttgtantaagaagcccaccccatggaatttctttaccaggtttggggnggggaaacaagcaataatgcccattataattgaagccttgggccttnntgggcntttcatttttccccaaagaaagccaagggaagtnggaactttcaaggtcantcccccancccaaatcngccttttggggttcnaagtttttccaatttcnaggcnttnttcttattngggancccaagtnaaattcttgggataaaaaatnaaaaccccgangccttttttntttttgggggggattccaaaannanttttaatttngacctttgtaagttaaacctt

SEQ ID NO: 185 - DNA, 324 bp, Homo sapiens
aagacatatatgatgtctgtctgggatcccagcaaccatcttggaccacgtgaaaaccttggggatggaaatcacatgctatggatggcgaagaaaactaaaagcgcctgagtcactgataccactttagagctaccatataagcctctcttaagccttccttttatgaaagaaatataaaattccatcttgctgaattcctatctgtgttactagcaattgaacaactgatttgccagccatctgaattacccagattgtctgataattggtcaatacccacttcattttaggatatagaaataaagcttcaaaactggccat

SEQ ID NO: 186 - DNA, 176 bp, Homo sapiens
ggtcagcagagacaaaggcaatgttggtgaggccatgtacattttcatctccttgagctggtactgtgagcaagctgttcatctctccacgccaacctcaatcttcctctctaaaaaagggactgatgctactttcctaatcctgccatgacctttgcaaataaaacacttaactg

SEQ ID NO: 187 - DNA, 268 bp, Homo sapiens
gaaactttaatacatcataactattcattaatgtatgcctggcaaagatcaaatgtcagaagatttattcagccacagacactgcaaattaactacattcatgggacaaccaaagcaagaaagcctcatgttttgggggaaagtttgatatcagcaatgtccagacaagcaagtgcataatggaacgcaacttcatggaacccaactcagacaggattgacagttgaagaaccaactctttaattgtgagaaattaaaacaaatctac

SEQ ID NO: 188 - DNA, 221 bp, Homo sapiens
aatctcactctggctgctatatggagagtatactggagaagaacaagaatggaaggagggagccaagttcagaggtgaacaagagctgtgagaagactctgaggccttaggaaatgggaaagctaccggtcaaaaggatcctggcccctgaataactgcacagctctttgctggtctgcactgggatgcgatgtaactgataaataaacatttcttatgtt

SEQ ID NO: 189 - DNA, 540 bp, Homo sapiens
  misc_feature 252, 259, 305, 311, 314, 317, 320, 379, 404, 416, 419, 468,487, 520, 526: n = A,T,C or G
agttggatgctgaaacttgcagtcacacaaggacttgaacctagagcttttctaaagcccgtactctttccagtaccctgagccaggggagccagcgggcagaaatgacgtgtgaggtaccctctctctcttcacttccatgtgatctgttactcattttgtcaagacatcctgggtcccagagaccactcttattcccaggtgtgtgacctcctcctacagactacagtgggaaagacaccatctccaggngccaggngctacacaagatactggctatagcagcgaacaggacagccccgctnattctnatnggnggnccaggacaataagaaaaaagacttttttatttttatttttttgaaacggagttttgctnttgtttgcccaagctggaatgcaanggtgtgatctcnatnactggaaccttcggcttccaagttcaacaattattctggctcaagcctnttgagtagctgggattcangcacctgccccactcccgggtaaattttggggntttaanaaaaaaaagggttt

SEQ ID NO: 190 - DNA, 258 bp, Homo sapiens
gcatgtctgcagaaatgatcagacgtatggaattacaagatctcctgctcgtttagggtgttcaaggaaatcaaagaactgtggaaaccattactgtccaggaaacaatgttgtctttgaaagcctcatcacctaagacatgtctctgaagtagatgaaaaagccaacccaggcatagtggtggagcccagatgtctcacatgtttagcatgagctagaagacactgtttaagtaaaaatgactaaagccagcctgcc

SEQ ID NO: 191 - DNA, 334 bp, Homo sapiens
  misc_feature 290, 313, 316, 320: n = A,T,C or G
gacactggctcataagggatttcaatgtgcacagagcaactgcctcctcacctccctacggattccactacaaccatctaggaggaccacagcagcatcgtctagccttccccttcccccaggaccctgggctggggtggaggaggaggcgccactgcagatccagtatggtgagaggaatctcatggcttccaccagaatccccaaaaccacagcacatcagtttgctagcttgcacaaaagccttcaccggatgctgagcaggtgctgggcctgtgcccttggacttnccacccttcagaccattaagtcnaantaanttcctttcctttat

SEQ ID NO: 192 - DNA, 370 bp, Homo sapiens
  misc_feature 117, 193, 229, 247, 260, 264, 265, 271, 276, 281, 283, 284,295, 296, 300, 311, 321, 324, 337, 341, 343, 350: n = A,T,C or G
gagctgagctgggttttacagagttaccgcgaggatttctgttgtgggaaaatacccaggaagtgactgagcccagccagacgtcactgggagacatgcagaagaaaagattttccnttgggagttaccccacaatgagttctgggtctggtcaaatcacccattattcaaacacattgcagccttcctgttntttaggaaatcaaacagaacttcagcagtatgcagngaggccattttaaacagngaaatcaccaacntaanncccaanttttngaaancnnggccttaattnncccncaaaagggaancttgttaccnggnaaaaaactggaancaananggccagnttcccttgttggaccccctg

SEQ ID NO: 193 - DNA, 258 bp, Homo sapiens
ttcagctgtcatgagaaagttgagtgatgagaccttgagcgggaatcatcaatgaaagggccaaggagatgagatggagcattgtaatcaacaaaagtgctaaacaccaagaagtgttgtcccatattttattacacttgagaatgtcttgctattttagacgttacaaggtatggcaagacagtcttgtagcagtgctagaatgattcgttgaaatgcattcaatcagaaataaaagatgctgttaataactgtcac

SEQ ID NO: 194 - DNA, 190 bp, Homo sapiens
gtcctcatgtgcccttgagctgtggactccaacactgctgtttgcaaaaagaagatggcaggaaaggatggccctgcaaagtgtgccatcatgagtgagcatctctgtctactcaaactctgattttttcactgcagccgacttagtgaggaatatgggcgcactaagttataaaatataagaatgacag

SEQ ID NO: 195 - DNA, 353 bp, Homo sapiens
agaactgaggttatttttgcctgctgtttatgtcatgaaccaggagcagcaaaaacatttaatcttgcatgctaactgactgataatcactgatggtagctctatgctaaggattctgagaccaccatgggactggatggaacagcatgctgtgatctgctaatgatgtctgctatggacaccacaagcatacagagtgaacctgcagcacagcaagaaaacagagcaccaggctgtgacttcacagaaggccctgggagttgcagggaagaacagagagtcatggcacatgaggctacaggaaaaatgattttaaaaaaagaatgataattataaagcatttattgagcact

SEQ ID NO: 196 - DNA, 326 bp, Homo sapiens
  misc_feature 197, 208, 253: n = A,T,C or G
gtctctgcctcctctctgtcaggaaggagagagagaagttaaccacacagaactgaccaccctctttacccagaaggagctgatcagccatctttaggcagaaggcttcctccagctgcacccagattccccttctgtctcccacagcaccctgggcttacttctccagatcatgtaacaccctgtgctaagattgnttatctcttgnctgacttcttgagtggatcataagctctttgaatgcaggcattgngtcttctcactcgcaacatctccagtgttgaggacagaagtgcccacagggcataggatatactcaattaagg

SEQ ID NO: 197 - DNA, 303 bp, Homo sapiens
acaacaagctggtgagcagcctcagcctgcctcctttgttccatcagagatgctcatgtcatcgggttacgcaggacaattttttcagccagcatccaactcagattattattcacaatctccttacattgacagttttgatgaagagcctcctttgctagaagataagttaaggaagtgttattaatgtgtgtacagctagaagaataatagcaataattagcacttaatgtgtgctgtcagcctgcagtatacagtgtcttatgtttgattgtttcacatataacaagagtttgctgaacc

SEQ ID NO: 198 - DNA, 170 bp, Homo sapiens
gtatgacacacacgatgtctaagcaactgccttccagcagtgattgattttgctggttccccacacaaaaagtttggaagagacccttatgtcttctgtagagtttcttggttgtaagcagcaagcactggtgctggctaacttaagcaaataaagaatatatcactcag

SEQ ID NO: 199 - DNA, 342 bp, Homo sapiens
  misc_feature 50, 77, 186, 202, 213, 241, 244, 245, 247, 248, 256, 264,277, 284, 290, 297, 309, 326: n = A,T,C or G
tgagatttatagtgctcttggggaggctcctggaagaagtgatatatcangacagacatactattcaaaagcttaanacttagcatctgactataaacaccatgccacaaagaagcttgggatgaaggatcacgaggcgagaggagtccagcgcccagcacacccactgggagctacatgcatganaccccacccaatcagnagaaccatacngccaacagaattatgagaaataagaagntgnngnnggtctaanccactaangctttggaggggnttggttnacatcnataggtntccttgcttggnactacttcaatcatttnatgtttgagagaggcc

SEQ ID NO: 200 - DNA, 280 bp, Homo sapiens
gaccagattaatgaagatcacagctgggaacacctgtgatcacacctgtgaagaccacacctgtgattatgagagaaggaaagaatctccatggaagaagggtttaaggaggatggggctagaggggagagaattctgggctgattcagagtctgtagaagaggaaactccccagctgtggccatgggacagaggagttctcaatgcctcccttctagaactagtactaatatggaagtggcataaacagataacacaacagacataaaatataaacaac

SEQ ID NO: 201 - DNA, 205 bp, Homo sapiens
  misc_feature 83, 112, 144, 173, 176, 180, 185, 188: n = A,T,C or G
gtcttgtttcagtgagaatgtaaagtacgtgagctatgtgctttgtgatgaagtcgttgatttatttcactttggaacaagcncaccacaacaaagtgagaatgagaaggtnattcagagggagaagaaggaaacggaactgtncgtagaaatatatcctcatatgaacttanacnctgnaatanatntaggttgtcaaaacacc

SEQ ID NO: 202 - DNA, 261 bp, Homo sapiens
tgggaatatgaaacccagctcccttgctgaagatgggacaacaccaaggctgaactcacacttgaattcacccacaggatggggctgagcctgagatctcatccttcatggcttcctctccttccttctgtttcagaggaatctgacctaactcacttgtttagagttacaaacaaaataaatggtgaggtcaggacctaggattgctgtattgagcaaataaaaatacaggactcttgcattttatctagcaataaaaat

SEQ ID NO: 203 - DNA, 124 bp, Homo sapiens
  misc_feature 56, 66: n = A,T,C or G
cagctcacgctgctgatgcaacacaggtgaagagcaccttcccctcccccacctgngggctgattnccaccacgtggatcccaaggccatcccaggaactctttggaggggagaagcccagtgg

SEQ ID NO: 204 - DNA, 265 bp, Homo sapiens
atgaagaacaaggccatagaaagaaagccacgagctcaaactgaagatggggcgggaattaggattcaaatccaggtctccggatccccaagacagcgtcttttccacaaggccactgcagccatccatcaatttagacatgaacctgttacctatgtggtcacaatcatgccatatacaaactttagccaagtagcacttttttcctcttagtgctttctcactcagaatcaaattaattcctcaataaagttataaatccaac

SEQ ID NO: 205 - DNA, 465 bp, Homo sapiens
  misc_feature 256, 391, 426, 450: n = A,T,C or G
ccttccttgaagcagcatgacccatctggatgtcctcctcatctcaggaattttctaataagctgtctaaatccagagatccgaccacagaacaatgaatgccaaagatgagttctaaagatgcgagtactttctttctaaacggacgctgctttgtgtatggctctgctcctgggggcagacgcggcaggctaagccctgcggaggaggagcaggagacagggacccagagaagtgaagaggcgttgccttaggntgcacagcagatgacgcctctcaagatggaccctaggttgtctgactccgtctcacagctttgccccatttatcatgaagatgaacgctggtaacactgctacctacgagctgagcttgccgccattcctggggnggacatgcatgcgtgccgcctcacgcaatgtgctnagtgcacaggaagggagaccaaanccccttgagggggtt

SEQ ID NO: 206 - DNA, 181 bp, Homo sapiens
agtgctctccctggttattccagaaacaccagtcgctgaggatctctcacctgcagttccctgctggatcttcattctgactggtcaaccaattgttccagtgcattgaagggctagcatttcatcatcgaattgctttgtacctatgttgaaaataaaatggtgatgtgtatgtggctgt

SEQ ID NO: 207 - DNA, 388 bp, Homo sapiens
gcaaacaagctgagagtttaagtgatttacccttcctgaaagaggaggtcatgaacagaattccaggatttggacctgtacaaatgccattaaggcaatttttcagggacttaacaaatacccacctggtgatgttaaactacctttgaagaaagcagctgttggcccaaattgtggcctacaaagaaccccttggattttaaggataagaaagatttgtatgaggtggactgacttctctcccaggaggcagccatatggaaggcatgtggcccagtgacaacaataactgacatttactgagcgttgacaatgaatgcgcgtaagacttacataatctcattatctctccaatacttaggtgcatgtctaattatcaccattttgc

SEQ ID NO: 208 - DNA, 418 bp, Homo sapiens
  misc_feature 14, 27, 34, 35, 37, 49, 51, 53, 56, 57, 62, 64, 65, 86, 87,88, 97, 99, 106, 122, 123, 125, 126: n = A,T,C or G
ttagaaatgcccgntacttaagagtancttgccnnanctacaaagctgngngnttnnaactnanngtgatggccattgatggtttnnntctcctgancncaggatntgcctgcctcagcctnncnnagtgctgggattacaggcatgagccaccgcacccagccaaggattatttaaggatggactccaaatccagtgacaagtttcctcagaagagtgaaagatgtgaagatagaggcagaaattagactaatgaatctccaaaccaaaatataccaaggactgccagcagctagtggagaaacatggaacagattctccttcagagcttccagaaacaatgaacactaccaataccttgatttgagacttagtcttccagaattatgaaagaataaaattactgctgttctaaacc

SEQ ID NO: 209 - DNA, 450 bp, Homo sapiens
gaagaactcccccttggaaaaaccatcagtgccggaagatttcctattgtgttgatccatggcaaaggagactgcagatacacaagggatattatggagcccagacgacctgaataaaacccttccctactacaaggacagctgtcccttccctacacactccctacaggctgatgagagaccttttttggaagcagaaacttatactttatgctgccttcttcctgactgccaggattatactcttcctttccatcccagatctagcaatgctgttgatgaggctaagtcatgatgatttctttaatatcttggaacacagtagatgcctgatatttgctgatggactggagaaaaactgaaagtataaaccacaacatctcaagagatgtcatgaatggagaagcatatggtaaaatataatgaaaattaaatctactttacaagtgg

SEQ ID NO: 210 - DNA, 390 bp, Homo sapiens
ctgaggaaactgagacttggagacttatgtgcaattaccctcaagcaagtggtgaactggattcagtccatgcagatgtctggggtgggatactgagatgctgcgttgctcatgagctcccaggtgatgagaaggggcctggtccatggactacacgtggagcagcagagatgtatcgacttgtccattgaagagacacagaccaggaaattgatctgctgccaccccagaactgtgtcatttatttattctgcccatacgtattgggtgtttctcctgtcccaggcattgtattgagatacagtagaagactagaagacgagacaggcctgctccctgacctggtggactttagacctaaagcaaataaattagactcttacaaagtgc

SEQ ID NO: 211 - DNA, 253 bp, Homo sapiens
gctctgggtgagtgttccagaagctgacgatgatgcaggatcgtctccctcacacacacaaatgccatggcaacagcaactccgtgacaacagcaaagaaagccagactggaatttgccaacccagagtgtcgaccatctgtgaggccaaaccctccaaatgttgcccgttctaagtgctcatctcaaccaggcttttgtacatagcagaggcgacatttaagtgacataagaataaacattgggcacatgtg

SEQ ID NO: 212 - DNA, 247 bp, Homo sapiens
gaatgttctcctgtttgttcagccagatctgggcttagtcttttgcttttctacacggattctaaaatcagcttgagcaagtccatgaagaagcttcctggagatgctgacaggaattactctggatttgtggaactggatagagatggcatctctacagcattgagtctgtgcaccaacggacatggcatttctctcctttgattcagaacttcttatctttcaataaaatttcagaattttctcc

SEQ ID NO: 213 - DNA, 173 bp, Homo sapiens
attcccaggtgaagctcatgctgctgtcttgcagaacagatttgagtcgtaatgctctagaacagaggttctagagtacgaggaatgtaccttctcagctccaacacagacctactggttcagaaactctgtggatgggatccagcaatccattccttattgagacctccagg

SEQ ID NO: 214 - DNA, 382 bp, Homo sapiens
gatggggagtatgttccccaaagctgccttctcaaggagttggtgccttttggggagtcttggatgccccattcgaagactgtggtgggtgaatcaggcggtaccccttcgccaagagcctggggaaatgggccaggccagggaggacggaagaatggctccatctcagaatgcaagtgcatcctctgcccgctccagctcctccatgtgccctgcccagatcctggcacttctcactggagaggactcggcccctgcccagggtcatgcagttatgaaggatgaggctagaaccctttgcacccatctttttcaaattacttcagccaaagtaagcttggtgaataagttgcaattaaaataaaggtgaacaagcctggtg

SEQ ID NO: 215 - DNA, 220 bp, Homo sapiens
gactcaggcttattgctgtttatttgtgggaccctgctcttttgcttggaaaccaagcaaccagactcttcactaaaccaacaccaacagatgaagttagaaggcttgaagctcttcctcagccccaggcctttcttcttcttcttttttttccccccagcatttgtggaatgtaaagttgaccagatgaaccaaaataaatttgtttacctggcttctt

SEQ ID NO: 216 - DNA, 146 bp, Homo sapiens
gtcagcatcacaagacgcatgaaagaggactcatcgccagggcatggagctggtgttttgatcaaaatggaatttgctctcaaatagacatgtattcactaatctcctttcttttaaataagtaaataaaacaaacacaaaatctc

SEQ ID NO: 217 - DNA, 268 bp, Homo sapiens
ctatctgctgcacacgaaggtatacatcaattgaaccgccaacaccctaccccaagaagagtacctggtggaagatccaacagtatctgggagtaatggagttttctcgcatggagttcagaagatgacatttgtttaaagaagaagagtaaagcaagataattatcagggtagaagtggagttgctactacatggccaagaaaagtgtgaatgtgctgcagtgattggttgatcccaagggcaacacactcagccagactgaaaaaa

SEQ ID NO: 218 - DNA, 381 bp, Homo sapiens
ctcacaattggatatactggttattttaccaaggctttaactggaatgatatatttttggatatgaccagactgctttgagcaatttaggttgtcttcacagagcaaataaaaagccccttggaaagactggcttggtgcctcatctacatggctcccttacgaggttcctgatgatcttgtgggtagttcaatacactgaatggttgtataagtgggaaaagtggcatcccccttgtccagtttctataagactaccattgaataaaggcctcaatcaaccatccatacctactgcagattcttctagatgctgatgtatgcggaacccagaatttctattcttggcacccatataagtaaattttatttgttctgcatt

SEQ ID NO: 219 - DNA, 298 bp, Homo sapiens
ggagcccagagggagccatccaatgcccttcatgaagtcacgcatagtcagccttgtactgattctgcaaaagaggaaaaattaaattatgagaagaaactggaacttcccaagaatcctaagtgtgtgtttaacattctgtaacttccatttcatttgtaaattttctgtaacttttccacttcaatatttgcttgaatattggtatttaaccaatagcatgttgaacttcaaccatttcttccctaaacttttatcctttttatatttccttgcatgataaattaaaaataagcag

SEQ ID NO: 220 - DNA, 128 bp, Homo sapiens
ccatcctccaataaattcaagtttttattttggaatgactttccatttaaagaatttcgaggatactacaaagagttccagtatatccttcattcatctctccctaatgggagagaaggattattttg

SEQ ID NO: 221 - DNA, 270 bp, Homo sapiens
gggttacataattagcagaagggaggagcttcaaatcctggcactctaacacagagattgttcacttaagactacacagtaccacttatgaaaaaaaactggcagaaggtgttggtggacaagaacctctcctcttcatggaagtgaacagaccccgcgacgtggccatgagaccatagagtacgagatggaaaagagccacataccactgtgcaagtggtagtttgaactcctgtatgcgtggcttatatacacacactactgagattt

SEQ ID NO: 222 - DNA, 461 bp, Homo sapiens
  misc_feature 413, 423, 443: n = A,T,C or G
gagctgagctgggttttacagagttaccgcgaggatttctgttgtgggaaaatacccaggaagtgactgagcccagccagacgtcactggagacatgcagaagaaaaggcaagattggttgtgactctcctcttctgggaacattctagaaaggggtagcaaggatgctgaaaccaggccagctccataagacctcactttgcagaaatagagagaagtaaggggtgtaggtaggaagaacagagtggtactgagaagtctcaaggaagagagcgaaggggaagagcagcatagaaagtgtggctgcatttgcgtggtggtcttactgcgtacaatggttgagctccatggtccttgtcagcctccctcacagggggaatgccgcagatctcttgaaaaaaaatagcttcctntttagcctgncccgaaatccccactatttncacaacagggagaatgcc

SEQ ID NO: 223 - DNA, 755 bp, Homo sapiens
  misc_feature 557, 560, 600, 638, 657, 687, 702, 707, 721: n = A,T,C or G
attcattcctctgaggaccctcaagtacttcagaagaactaaaaaatgaatatcacgttacaccaaagaagaaatgaaagctgccagtgtcttctgaagttaaacaggctcctgttctttgacccagcaatccaatcctagtgccatgtttgtggacatccccccactgcccttcatcctcagaaaggaacagcctcctgtgggttgacttggtgatatctgtccatagataatgtctccaaccccaggctcatcactcagacatctgccctcaggaggacacgttcatccccagcaccagagacatgtctgccaaggcttttggaactgattttatccccatgcaaaaagctagattctaattctgtctgatcacaaaaggttgaatcaaagccctacaactgaggttcatgcaccaaaacaagaaatacatggaaaagttgccaaaggattttagaatatcagaggctgtaattcattatagatgtggatccttttgctttcctctaaggaaaaaaaatattcaattttattaagaaaaaattcccactaactgnggncatgttcaaagcactccagaaaatattttgaacgccacanggtttcgctcaaggaagaaaattcatcattttaagggnggggggaaaaggagctggncattcattttctctcaccttatcctaacanttataagttaaaaanggganggattggcttttgnctaaactccatggacaaaacaattttttgccttt

SEQ ID NO: 224 - DNA, 422 bp, Homo sapiens
  misc_feature 262, 294, 338, 354, 369, 398, 399, 405: n = A,T,C or G
aaaaattgacagcaggggccatgtctgtttggtttaatgctgtaacattccaagcacacagcaaatgtacctcacgtgattaattctcatgagtaagcagagatcttgacctgtagcttcttacatctgcctatttgtttagcagaacagagaattacggtaaaacagaggcatggtacaagcgtttgtgtttgctttacaaacacgtctcccaacttagtacaaaaaaacactgcaaactcttaattttagatcttcttangtttgttgtaaatagaaagtagagtataatgntttatagatttatttctaaactatattatgggtacttttctcgngcttttcagatatttnagaaattgggtatgngctggcatgaatattggaatccttttttnnttaaanggttaaggaaaaaattt

SEQ ID NO: 225 - DNA, 207 bp, Homo sapiens
agtctgaaatgattccacctggtcttagcagaaagctggcccggaagttgtaatacatgaagatccaacagccaccacgtgaccaagagaaaaaagccaaaagaatcacagacctggccttcacattgtaaaggttcttagccagggccaatagttgccgctctctgaacttcttatcgtatgagaaaaataatcatttacttgttc

SEQ ID NO: 226 - DNA, 382 bp, Homo sapiens
  misc_feature 332, 343, 345: n = A,T,C or G
gtttttgcaatcgcctgtgtgttttctcattcaagaaacttgagtaattgtttacaaaccagaatgtcctctgtactgagcagaagaaccctgcagtcctttgaccaggaaagcaacatgtcaaatataaagagcactgtctcgagaattagagagccaggccttggcttccctctaaccctactggccatgtgactttgggcaagtcacccttccttcctgtgcctcagcttcatcttctgtataatgagaggactggactaagtgaatctcctctaaccgtgacttacacacaaacacacacacacagacacacacagacacaaaccacncaccccaaccncncaccaccaccttacacactttgcccatggatctttat

SEQ ID NO: 227 - DNA, 482 bp, Homo sapiens
  misc_feature 398, 415, 455: n = A,T,C or G
ccggacctctacattgctcaatatggatttacacattgacattataggaacatttgaaccatctgtaatattagcatgtttctagagaaaagatggctcaagacaacaaaggctataccacctactaccctgggaatgaatgcagcaggaggtacttagctgaggcctccattgtccttatggcatacatctctggaggatggtccagccacgataaatttgcaatacagtaggtctgctctggctggagcacagcagacattttcctacagtgctgggctctctgatgcgagatacctggaacaaagacctccctaatcaaatcagcctttgcctttccgggtaaggcccagcatgtcaatcctgctaaaaagcagaaaggaatcctgaagcagaanggttgtaatatgatganggaggaaccaaaggaagaagtgaggaaaagccaaataatnccttgggccttggcacttgactccttt

SEQ ID NO: 228 - DNA, 408 bp, Homo sapiens
  misc_feature 391: n = A,T,C or G
cagttccagtgccttgcggggaatgtcttcaccagtgctctaaaaggcaacaggattttctgccctgtatccagcagcttaaggcttttgtttcaaaagggaataagagagaaaaatctctcctatcatgcttttcttgcggtactgttgcctgtttttaactttttgtataaatggaatcattcagtatgtacattttgtatctgttttctttcactctacagtatgtttgaaatgtttttatgttgctttgtatatagttttcttcagatttctgaaagtatgaccgacaaataaaaattctatatatttagggcataccatgtgatgtatatatttacatatatatggaggcataggggaatgattaccaccatccagcttaataaanatatccaccacctcccc

SEQ ID NO: 229 - DNA, 399 bp, Homo sapiens
  misc_feature 336, 345, 372, 386: n = A,T,C or G
gtcaagtcactgaggtgcagagacactgcctttctgtcctaaagtccagttcaggccagctctctccagagttccaggcttttggtctccgtctgcagatctcctttgctttgaatgagtctgtccctgaggagggctaggagcaaccttgagaaggaacatgatggtcactaattcagccagaacactctcaaggtgcattctgagcgaggctgatgccaggtgcagaacaaacacctcttgcgcctgggagcttcctgaagtttggagaatgtgtcagatatcacctgtttgcccctgggggcctaaccccacccctgtctgcatttcgtgcanactacactnggggcttccgttggccttccgtttggncagcaggaaacttntggcaaaagatca

SEQ ID NO: 230 - DNA, 283 bp, Homo sapiens
  misc_feature 235: n = A,T,C or G
tgaccgctggaaagggaacaccttgcaacttctcccacgaggctttcgatcctaatgtaaggagcagacctctcccgtcagaagtacatggtggggaaaaagggccatgtggacacatggaaacggattcgggcaggaccagaactatttccttagccacacagatgaagggtttgtactaattcctcagtgaggaggaactggaacccgatatcaaaatccactgtatgtcctntatagtttattgtatataattatgtaccataaactgtgcatggcttac

SEQ ID NO: 231 - DNA, 399 bp, Homo sapiens
  misc_feature 184, 265, 294, 317, 320, 340, 352, 357, 367, 377: n = A,T,C or G
gcagtgttggtctgcaagcttcaagagccagtgaccctgactgccaagtgatttgccgaagggaattatggttttgcatttgatggtttccaggaactgctaagagtgagatcatccctgaagcagtgactgccagaggaaggcgagagacatatggtggccttacaggagaagaacatgtctnagagagctcctactcctccagttttggccccagaatgaaacacaggaagaagacctgaatttgatttgcatttcaaagtanaactgtcccagctgacatgaagactgatnaataaggaataagtatttattgntgnatgtcactgatattttctgngggccaatattntgtanaaaaacctgnccttgggccncttaccattaaaccttgaagaa

SEQ ID NO: 232 - DNA, 60 bp, Homo sapiens
gtggatgaagttgggtgcttcctgtacattgattttgcttccttctggctcaccaagaaa

SEQ ID NO: 233 - DNA, 321 bp, Homo sapiens
gcagcgaccttcggcattaaattactcccgagaactcccgagcaaagcaacaaaaccatcaaatatggctgagccgataatgcgccattgtggtccagcctgggcaataagagcgaaactccgtctcaaataaataaataaataaataggaacagtgatcactaattacaaaattgaatatcgaacccaaaaggcatatgtgtccaccggaagaatctttctgaatatatcaggtttgattccatgtaatcccacaccagcccaactacccacatccagacccacatccagaacgttataatctgataagtgcgacaaaac

SEQ ID NO: 234 - DNA, 240 bp, Homo sapiens
aagcacctgagactgcagagagtgccatgcaacaggaagatcagtcaaccacagagcaccaactatcacttgcccggaaaacatctaccctcaacactgcccagggaacatctaccttcttctggtcaaccatttacaatctcttccaacctccaacctccataccctctccttacccccttctctcaatatagcctcaccccttgtatgtcatgaaggaaataaacccccttatacaag

SEQ ID NO: 235 - DNA, 600 bp, Homo sapiens
  misc_feature 307, 480, 489, 532, 539, 568, 581: n = A,T,C or G
gcagcaccttacaagaaaagccagaaaagaaaacccgtgtgtattgtaagagtttaaagagacagccactccaaaagaaaatggacattcacattgacgcctggaaaagaaccaggagtcaccatgcaaatgtgtcatagcagcgagaagtcctgtgaaagcgaaggagatcagccaggctcccgtgagtcacggttcaggattcagatcttcatcttcctaagacactgatctcactggtcccagttattcctgaaacgctgtccctcctccgttttccctgaaatttatcaattaaagtaccggntcttgtgtaaggtaaaaagattaagaagtttgatgagacagagtttacaacagctaaaaaagaagcttaatgggatgggagtggttcacagatggtgcaaattgtctgctaagtggcactttatggatgggcagaatccatgagagttttatcttgaatttctatcaggctgnattcagcanaaactgggtccctggaaattggcattttaaaaaaaatctctgncgggggnctatctttcctgggtataccaatggcagnttcgacccattcnagctgggttcttgaacaag

SEQ ID NO: 236 - DNA, 202 bp, Homo sapiens
gggaaatttggacacagagacagacatgcgcacaggaagaatgtcacgtgaagatgaaagcagacatcagggggatgctggctgcttacaagccatggaatgccgaagatagtgagccgacaccaggagctaggagagaagcctagaactgacgctccctcacggcctcaaaggatccaaatctgctgacaccttgattttg

SEQ ID NO: 237 - DNA, 427 bp, Homo sapiens
cacatgcttacccagaccctgatacgatcctggaccaggcagaagcagcgtccttctcctggaggagcttggagcagcagcaggaggcaggcattacaccccgataagcatgcagagttctgaagaggaagctcgcagcctcactcactccaggcttttcctctggacctgagctctgatacccactgcattgtcagaaccagagcaaatctggaggccagagagcaagaccagcaaagccaggatctctggggtaattaggcccgccttgcccacaggtgctccacaggtggtctcagctcccagcaatgacccagggagaagcccacgggaaccctcagctgcaaccaatcctccagactgctggcctgcctgccttcctgaaatagtccagatttcacttattaaacatattaatctgaaagtt

SEQ ID NO: 238 - DNA, 248 bp, Homo sapiens
  misc_feature 13, 132: n = A,T,C or G
gtcagagagacanggaaccaggaggccacgactggaaagtccaggcagaagagaactgtggagccagcccagggaaggacagaagtggaaaagtcaccacagacaggaacaagcttcctggcacacgacttncctgccaaacaactcaactgtagtcaaaaggaaagagatttgtctagtcctataccaggacaaggaggagattccaaggtgctccaaactttactgattgtgcccttgttcagtta

SEQ ID NO: 239 - DNA, 401 bp, Homo sapiens
gtgtgaacttgtatcccaggctggccagttaggatcttccattccatccccaccaccatgactggttcaggaacagggaatgagattcgatcctgaaacccacattgacactactgggaaagataaattcccctccccaccacccattgaagagactaatctggagctgccagtggccaccatgtggaaaaagcccacacaagaatgacaccaacacagagggagagccagcctgagagggagggagaagaagaagaagagacccgatggcatcttttcagctccgggacccaggtgtactccacccactcgactttctggatagaaaagccaataaacaccctctaatgctcatgccagttggactgtttttcaattaaaataatcctaacacacccttt

SEQ ID NO: 240 - DNA, 490 bp, Homo sapiens
  misc_feature 327, 416, 426, 443, 444, 445, 453, 459, 460, 466, 470, 477: n = A,T,C or G
acggagtctcactatgttgcccaggctggccttgaactcctgggctcaagcgattgatccacctctgcctcctgagtagctgaaactacaggtaatctgcatctcattaattggaccataagaccaagcagccagacctcagttttatccgggtacaaaatctggcagctccactgggacagagctgccctcagcagctagaggcttgtgacctgacggtctttaggagactcccagcagctgctaggtacagtttgtcctgaggacgcttctgagaactttccctgggcaaaaggaccacccatccccttgctactggggtagaanaggggctaggacactgaaggggtgagtaaaactggatcataagcagggagtctattgcttccttatcaggggctttgcaaagccattcntttttggtanccctttaaggagacaannngggctttntttgannttttcncttngcatatngcttggaaaaata

SEQ ID NO: 241 - DNA, 330 bp, Homo sapiens
  misc_feature 20, 21, 136, 215, 217, 224, 225, 230, 232, 254, 256, 261,267, 273, 278, 282, 283, 290, 294, 295, 300, 302: n = A,T,C or G
ggagcaagcctgtcaaccannagcatacgaaaccggagttcttgccttatcagcccttctgcatgggaaagctgcctcagcacggctctgtctgtgaatgcctaactcttcccaattctgaggtcagaaccagcanccccattggctaagagaactgaagctatatcctccaacttagcttatccggttaaaagataaaaggatgatattttgantnctgtaannaaaangncggaataggccttgaaggctcnanttganccgggnccaaanagctngaannggggganctgnnagagnancaccatgagacggggaaagggggatgga

SEQ ID NO: 242 - DNA, 139 bp, Homo sapiens
aattgaaagtgaagaccgatgaatcatgccttctgatcaagacccatgttggagattgttgccctgaccttgggaaagtctgtgtccatgtaaattcagatcttaatgaaacaaaaataaatgtaaagcattttctggg

SEQ ID NO: 243 - DNA, 457 bp, Homo sapiens
ctgaggccaaagccccctccccagagcagacccctagcactccacagcaggatcacaagctggtctctggtcccagaccctgcggatccttgtcgacgcttccagtctcgatcacttcccgatggtttgaatgtgaagtcaacaatccacggaacaatttgcacttactgtttctagggcttttgcagttaaaagtgtcttcagtttccccgatcttcctgcaggtgcccctgcagtcagaagctgagtctgtcccttctcccagcagcagctgggtacaggatctaacatcagtctctgcctgctggccagaagccacagctgcaacgtgctttcaagaaaaatgggccaggcccaaaggagctccccgtcaagtgcttttcagtgttcccagcacaaagataaaattacacttccataggagtacacaaactaaaaataaaatttaaagaaagcg

SEQ ID NO: 244 - DNA, 420 bp, Homo sapiens
  misc_feature 20, 208, 322: n = A,T,C or G
gacgtctggttgctcctgcnttaagtccatctgagatcaactgtcacttttcccacctgctttgtgactcatgaagctggccttcacggactgccccaaccagcctctccagctctctggtttccaggtatcctctggaatacctggaaatatacaataggaaacaccatcatgagataggaaaacaggagaagagagagatgaaganaacaggaaggaaacagattgagacctctggaaacagatattgagacagagttgcatgcagaagatttattgcggagcacgcttgggggatacacctataaggaacttgatgaangcaaaatggacacagagagaggctgactcgtgatacagctgcatccaggacatcagctgatcttatatggagatagaataaaccttcacagttgtctc

SEQ ID NO: 245 - DNA, 463 bp, Homo sapiens
  misc_feature 412, 417, 444: n = A,T,C or G
gtgcttcttgactgggaaggagtggaagaggtcctaggtgcagaagggtatggaagataaggtcaaaggatgtgctggtgggaatgggagacaactgagaaggtgagacaagctggaggaaatgtcaggagctgctgagagaagctcagcctgaccagagatgagaattgccatcttgaatcgtcaggaagtgaaggaaagcccaggtgaatgccacccaatcaaaaagaaaaaacaaatgcagatggtaaggtagagaaggctctgaagcccaggtaatgagagccatgttaccctggacagaagcatccaacaccacacatctccaaggatgttggagatccagcatctggatccagctaacttctgcatcctcttctgtcttcaaaaagtaacattggccgtccttgcntttgntggacaacaccccctaaaacgagtgtntttgtacgttttcacacac

SEQ ID NO: 246 - DNA, 317 bp, Homo sapiens
tttcaggggtaatcttgtgacaaaccaggcatggagagctagctgtgaaattccagagatgatctcaaggtaattagtctacagcccagccactgctgagatgacaccagcacacgctccaggtggaccatgactcaagacggccaccagaacaaggcataccgaccttacactcagcaccatgcccgcatgcctccctctccaagttcctcttttaagcccctctccccagcctaaagtttgaaatgtttcttgtaaggaatgagcctggccatttccccaaccgctggcttttggaataaagtcactttcctttt

SEQ ID NO: 247 - DNA, 320 bp, Homo sapiens
gctcctgtgatcagctgagtgctcgttaattcccacgttcactaaaccatcatagttctgctgattctcagctttagagggaaactctacagtgaactttttcaattagcagtcatcaattactggtcagaatacattataattgtgaaaattatgctccattaatctcattaaatgtgcctaaacctgtaacttgtcatagttcgatacataggttggctatatttaactttccctgatcttatttgccattttttgcaaaagcatcatctaaaatgtagagagagttgtcagtaattttggctttttaataaacattg

SEQ ID NO: 248 - DNA, 218 bp, Homo sapiens
gtctcacagaactctcttctcttcagaatccatcatcttccctgactaagaattcactgtatggagagcactaggagttgtaagagctccaagcctaacataagagacattcatccagcttttagataccacaatctattcatctgtgcctacttacagccaaatatcagaattacatggaaatgttaggctcagaaccataaagactgtcagaagag

SEQ ID NO: 249 - DNA, 546 bp, Homo sapiens
  misc_feature 490: n = A,T,C or G
ataatgaaataaagctcaaagaggctcagtttccaagattacacaaccagaaatgacagaagatgggtccctctgggattcacgctcctctgctgggagtttcacaccattcgccatgtcaacatgaagcaacagctgggttgaagagagccgataaaaatagcagcatcgcactgcaagcaagccgcatagaaaagaaggggagtcaccgtacttaatgcagggtggcattgatttcttgtcttcccagtccagtggtgtatttctcggaccatctactttttcagaaagagcaaagtgagctgcttgtccatatgaggaaagagacgctaagagaaattgaggaactttgctgacctgatgtaactagatgggactagaaaccttggctcgcggaccacagagttgacattacagccattcacatgagtttgcatttgtcatctgaaccttctggatttctatcatgtcacttgctgcggtctcttgnatttgtgggaattaaaattaaattggggaggtttttattgacttcttttctttgag

SEQ ID NO: 250 - DNA, 427 bp, Homo sapiens
  misc_feature 315, 336, 341: n = A,T,C or G
agagacagagtcaagcatctgctagcgtccttggacaagaatgcatgtgtggacacagagacaccagacgccaatacctggaggaaaactcacagcctctgaccagaagtgaactagcaacaatggtacagttaaaggatccgccttgccactcggctccttataccaaaagccaaacctcttttgctaaagcagagactgttacatctcagcctcaagctggcaaatcctgctttggatcccggcagaggaaattcagccgttcattagccttaacaagctgctgtcactaagcgaagaaattacacgagcagncacacacccggggcttttaanagccntccccccaagggcaagcgggtttctccaggacggactgtacaagttcacacttcctatgtgcaaatccggactgtcttcttgggct

SEQ ID NO: 251 - DNA, 530 bp, Homo sapiens
  misc_feature 253, 255, 302, 330, 353, 367, 371, 374, 403, 418, 451, 452,468, 486, 490, 508, 509: n = A,T,C or G
aacatgagctcaggagggctgggatttggcctgccttgttccctgcagtactgccagaactagcattgcacctggaacatggaagggcccaggacacagtggccgtgggacaagagcatgaagccccagagcctcaagcacagatgtacctctcctggggcagggggtttcactctgccccacagcgggaggctacagcctggccatcctggggaaacccaaagggaacacatggacagatcagcatccactntnaaaagtgccaatgacttcaagctggaatccacccacaggctggtcgnccctggctggccaggaaaaggctttatnaccatgccacaaaagctttcaangggcttttttggantttnaanccccctggcctaaggtttgaaaaaggcanggccccccccaaagncctttttttttggggggattttttaccctatcnnattttaaacttcaaanaaaaatttttaagccttncccngggaattcatctttaaannatttgggtcggtttttttaac

SEQ ID NO: 252 - DNA, 279 bp, Homo sapiens
  misc_feature 219: n = A,T,C or G
cacccataaaattcaatggaccaccatccggacaaaaggataaaaacagaacacatcaagataatgaattttcttcaaactactgaggtacaatgaaaaatggaaatattatctcagaaattacaacagagggatgaagatatagcatatgctgtacctaaaagatacatcaaatgggacattgggaatatggattgatgaaatttaatttgcgattgncctataatgccttttcattacagtaccacacaaattgaggcaataaatgtatatttgatc

SEQ ID NO: 253 - DNA, 296 bp, Homo sapiens
gatgagaacctggctgtttaaaaacatggaatcagtggagtcctgaatagcagcacatgacttgcaacaactttcaacatctcataaaatggctgctcagcattcactttccatctcagagtcacttctttggaactgctagggagtccagggtacatttgagtcctggcagctcatgtcctgctctgtggcagctcttcccactgctcataggagtcccatacccacttctcaaccatgtccggctgagcattacaaatcaccttctgtttaaaataaaataaaataaaaatctg

SEQ ID NO: 254 - DNA, 548 bp, Homo sapiens
  misc_feature 270, 324, 403, 461, 464, 471, 484, 518, 526: n = A,T,C or G
gatgaagaaaacgcagatcactctaagaatgacaggtttcctgggtgctgtgaagcatacctaaacagatagctgcaaagaaggatcttttctctatttcaagacatgaacactgccccatccccactcctggtattttgtaccctaaacaaaattgggtatttgcctgatataacctgaaaaaggtggtgcattatactttacatagtgatttatagtttacaggctgcttttacgatggtctcatttagttttccaaaatcaagctgngatataagtgctattattcccctttttaaaaaggggaaatgggggacatgtganggtaaagtgagtgggtcaagggtacacgactagtcagcagcagaaccaggactagaattgcaagcccagtgttcttganggttgagccccaagaaactctgtccagggctttgcatcatggggatttggcccacccnccntaagcancggagggatggantgcaaaaacactggcctttttcttttgtcccaancctgcctnttgggaagtccaggaccaaaaa

SEQ ID NO: 255 - DNA, 219 bp, Homo sapiens
caggtaaacaaccaccacagatgcaggaatctgacagattatgaatctgctgctaatactgctgacttcagtcccaggctactctgccatgatacagaaatatgccaagtctgctccaggaagctgctgaatcaggaatccacctaccacattgggcagtcactgctagctgccacctcggccttgatcctcgccagcaaaatatatgcctcaaacttg

SEQ ID NO: 256 - DNA, 374 bp, Homo sapiens
atggggatttcggatgttggaatcatgaggcttttgtttaagagttgcttaagatgttcttcagatcctgaattccagcagaacagctgacatccacaaccagtttgaggatccccacagaagagctgaatcaacatgagaatgcagtttcttcatctctccagtccatgacttcaccctgcaatccccacagaagagctgaatcaacatgagaatgcagtttcttcatctctccagtccatgacttcaccctgcaatccccacacctcagcccactccaaaccccttacaaactcctcagggaggcaaatctgaggtttccttccatctccttgttcagatgccctatgattattaaaccctttctctgctgc

SEQ ID NO: 257 - DNA, 199 bp, Homo sapiens
gtcatgcgtttaaaaagaagagggcattctctgcctgcctgctgcttggacagtgaacttgactgttggccatctcagactgcaaatgagggcaatactatacgaggaccaaatgacaatgaaggaatcgggatccctggatgacttcatggaacaaagtcatcgtatctttcctggaatgccagcttccaatgggtgc

SEQ ID NO: 258 - DNA, 463 bp, Homo sapiens
  misc_feature 13, 14, 51, 53, 310, 313, 347, 376, 440, 448: n = A,T,C or G
gaaggtcaagttnnaagccccgatggatttgatgcagcccttgttgcttgnangatgggagggggttcatgttgcaaggacgtgggtgatctcccagctaacaccagcaaggaaaccaggactgcagtctcacaaccaaaaagaattgaattctgccaacaacaagaatgagcttggaagtggattttcccccaaagtctccagaggactttgccccctgagcagcgaagccagccatgctgtgcagaacttccgacctacagaactctgtgctaacaaatgagtgttgttttaggctgctaaagtttgnggnaggttggtacacagccattcaaaaattaatgtanaggggggaaaagaaacaggaggagctcanataagcttctcccaccaccacaagctgcatttaaagtggatagcatcagcttcaggtagaaatncaaggaangtgtgttttgtcaac

SEQ ID NO: 259 - DNA, 34 bp, Homo sapiens; identical to SEQ ID NO: 143

SEQ ID NO: 260 - DNA, 149 bp, Homo sapiens
  misc_feature 6, 12, 15, 28, 30, 62, 108, 131: n = A,T,C or G
actaangaaaanctntatgaggatacancnagagggcagccaactacattcctggaagacanccctgaaaccaacactgatggcacctagatcttaacttctggcatntggaactgtgaaaaaataaattnccattgtttaagccatgc

SEQ ID NO: 261 - DNA, 440 bp, Homo sapiens
  misc_feature 358: n = A,T,C or G
ggaggaaaaaaatgagcagaaactgctaacatctggaggctgctgtccagtttacgtaatctcttgctgcagaggaggaacacgggatccccagccagatggtccgtgggtgacttcacagcacatgtgctacctccaagacagggttctctgaggaacaaggaccttccagagtgatgcttttccctagtggcagccttggccagggcaacagacatctgcacaaacgcagggtgttgaagcagctgttctgagatgcagtgcctgagaatctgggatccacaatgtgaacttcccaacaacccctgcacctgccactttccttgatctttccactaagcaccagaagacacatgcnttttaaatcaaaggaatgtgagttggaatttcagcttctgccattcactgacaacatggccttgaacccttcataaactcta

SEQ ID NO: 262 - DNA, 253 bp, Homo sapiens
  misc_feature 5, 105, 125, 184: n = A,T,C or G
caganactgaggacctcactctgtcacccaggctggagtgcagtgggtgcaatcttggatcactgccacctctgcctccaggctaaagtgatcttcccaccttanccttacaagggagcagggantacaggaatctggcatcttcctttaactttcagggaaccatggggggaaactacccatnggctttggtaaagccaccaagttggcattcctttttaaataaaaaaccttggttaaaaccaaaaccttt

SEQ ID NO: 263 - DNA, 451 bp, Homo sapiens
  misc_feature 408, 432, 433: n = A,T,C or G
ggagtggaagaaagcagacaagatggggattgcccagctctgtgaacgtgttggatgggtgcgtctatcccgagtacaacagaatctgaactcagggcagtgtgatgtactccagaatctaccttctgatggtcatgggctcaggatgggccttggaggagatctgcacaggaagcacaaagctctggttaccactggaagccgtcttgcccccataaaccagccttaggatgccactgatgctgtatggcagaatggagtaacagagagaatttgcagaataaagaagggacaatgcagtcaccaggtcagcattaagggaaggcttggctgcatcatctgccactctgctgctgctgactctgccagtggggacagcacatgcttccttctacgcttgcctgaggntcgtaacttcaaaaccccacaacnntttttggaaggagtaaaa

SEQ ID NO: 264 - DNA, 210 bp, Homo sapiens
atgaaaaacagaagcaacaatatgaatcaaggcattctcaccattcccaagcttggagggaaggatcctgtggcaggcaaatggaggacatcaggagataaggcaaggtccctgccatcaaggacctgacagccggctatgtgattctgggcaagtcactaagcttgtttttacaactgcaaattgagataataaaattatctcccttgg

SEQ ID NO: 265 - DNA, 324 bp, Homo sapiens
ggtgagacaacgataagtaagcaaccacgacacaggaagagacttgtcggggagtggaagtgctcccaggagcatcaacttcgcctgtgggctgggaaagtgtgcactgtcccagacagacagaccaggatctggtgatgttcccaggagccaggcacgaaggatcaaacagtgaaacttaagagtttgagcggccttgcctcctggatcttgtctttgcctttagaattgtaattataggatgtgtgtgatttttttcccacttaacatgtcgtgaatattttccatgtctatgtaatcctttaaaagctatttacaatgatt

SEQ ID NO: 266 - DNA, 82 bp, Homo sapiens
  misc_feature 11, 18, 21, 31, 44, 53, 55, 62, 64: n = A,T,C or G
acgggagtctnactatgntgnccagcctggncccgaacccctgnccttaggantnttaaaangnaaatagccccaatcattt

SEQ ID NO: 267 - DNA, 245 bp, Homo sapiens
aaaacctggcccatacagagcttacacctatgaccttggcttcgtgggcaccatgatctcagcaatgcatctatcatgcctgcctttggacctaatgagtatgaaccacattacatcagagaagagtgccagggtcaacaattaatattttagagttacaactacatgtgaacctatgtacttgcattttcagcaatattgcagcatagtattatttatctctaaaataaaaaatgcatgaatat

SEQ ID NO: 268 - DNA, 455 bp, Homo sapiens
  misc_feature 1, 10, 13, 19, 20, 28, 30, 31, 35, 36, 47, 48, 49, 58, 60,63, 64, 66, 84, 86, 91, 94, 100, 111, 171, 172, 188, 204,205, 233, 234, 247, 251, 271, 283, 383, 417, 419: n = A,T,C or G
ntgctattgnctnaatcgnnggaaaatncnngganngaagcgctagnnnaccttctcngnccnntnccaacaagcccgggcctncntctgntgncatganacctcgaggtngcaaggaaatgctaatggattccgaggggcatgctacttacctacatggaattggcttcnnaattcactgggcaacntactgagactaccgtnnaggctatttaatcatcttcactatgaanngccaattctttanagtnttatgacattcatgaatgangcggggggcggncatgatgaatgcagagcaattccctgcgacagatactttcagggaatttatgccccctcccccaagaacaaaagggctcctgggctcagttatcatttgntctgcgagagaaattacagtcttttcagcaactncntttaccctactcaataaaaagcgcttatttttgaaa

SEQ ID NO: 269 - DNA, 182 bp, Homo sapiens
agtgaagagatttctgacttcctgtcctcttccctgctatattacatacatctgcttaaactctggaaaacagtaccagtcaaagtggtgctgaaaccttcctctaagacaaactaaaacgatgttaaaaaggttacacgaccttactatttcaagtactggtataaaaccactttctctgc

SEQ ID NO: 270 - DNA, 502 bp, Homo sapiens
gcagactcaacttcttagagttccagcacattgagccctgtttgtctcatccatcttttcactgaccttccaaaggtggactggatggagaaccccagctgtccattgtgtttgaaatccctttaagtagggactcggctagaggtgttcttctgcctgatccccagatgaaaaggacgggaggggagtgacagaggagtcttcagccagctgccatatccccatgccggaccatggaacctgacttccagcgcactgtagcagagaggtagctagagagcagaaagtagagatttggctctcctagggatcttggagagaactttgttatttcagcttttgagatatcttctcttccttcataaggatgagacccagggtttcctgatagggcactgccctttaaaatggactttgggaataatttggcccactgggtttttttgaaaaagaataaaggttggggggtgggaacctaaagccctaccccctgggggaattg

SEQ ID NO: 271 - DNA, 186 bp, Homo sapiens
aaaatgagcaacttgaaagcagaaactataatcactgtgaattttcccattgacctgccttgcctcttgccaatttttatgaatttttctatttccctcaaaaccttgtaaaaggactcttcacacagcagaattacaacgacttgtctgttcaatgaataaatcagctcatctttatcttctaag

SEQ ID NO: 272 - DNA, 386 bp, Homo sapiens
gcattatcaactgatgtcccacaatggaggatgaagatttactttctctctcatcaataaaaatgtcggataatttttgtgggtacgcaattccaggttgaaaattaaaggcaatattccactgtattctggtttccaatgtcggtgtgaagaaatccaaagccactgatacagatataagaaaaagatttgagtctttctacatcaagcagaacatccttggaatttctagcctggatttccaatgccaacagaatgttcagaaggcattcaggccagtgaagttaccaacacaacaaagatgaacgcttttcaaaaaagaattgcattatttgctaataactgatacttagcagcaaaataaaaaccataaaataaagaggctg

SEQ ID NO: 273 - DNA, 482 bp, Homo sapiens
  misc_feature 419, 428, 430: n = A,T,C or G
atctataaactaagaataatctggagaggtcaattcctaattagaacctagtatggaagactaggatcctaaaactcagtggtaactccgaagagtaaaaatctaccccagagctatacgtgaaagattggaattttacagggaggtttgcattttaaaactggttgctgagatttcaccagaactaccacagaaacataccaggaaagctgagagaatccacagatcctttgaaggaagtggcttgctgttgcaggctccttgagacagccaaaaactgacctccagtacaattttcaggagaagtggcaagaatggacatccacctcccaccatgtgatgacatggaatttttggccaggtacggtggttcaaacctataatcccaacactttgggaggctgaggcaggaaaactgnttgagcccnanaagtttgaaaacagcctgggaaacatgcaaaacattaaaacttgagatccaa

SEQ ID NO: 274 - DNA, 479 bp, Homo sapiens
  misc_feature 424, 430: n = A,T,C or G
gccaatcctaacccagatcaaagatcctgggacagctggaacaggcatggcctaatggaactcccaagtggacagggccaagcatggacggacagagcttctgaaacagtcctcagaccccgtgcatctggatctttctgtaggaaccacccatcagcagtgccagacagaaccaagcacatgcactgatccaccgcacgatgggagctggtgtgggtgagcttgtttgctttagccatgcccacagacaggaacagaagagcacagtggaggccaccagccctctcgcctgctatttcaaaaggggttgcagcagggctggaaagcggttcccactgtggttgcccccttcctctctgcggcacacacagacctgaaaataaccagagagggactgtgagctgccagcctaaaacaaggaagnttgcanaaagtcctaggctcagataggagagtttaaaagaatgttgaaaccgaga

SEQ ID NO: 275 - DNA, 490 bp, Homo sapiens
cccccgttgccactgaaggctgcatttgagagatgcccaactgactgagacgagaacagaggtgctaccctggaacctggccacaaggaagccctgatgtgtttacagtgtgagcttgcccacaacttcaaattcatcaccatcatgctctaacatcgaagtcctcacgtgcctcacataaggaagcacaatttaaacgtcataatagccaatgatcattaatgtttactgagctcttttaaagcagaaggaactatggtaattgcttcccatgcactacacactagttaatcctcacagccaccacccctcatgttagatactattatcattcctatttcatacacgaagaagctgagcttcagaagtggttaagtaacttgctagagaccaaactgtaaggagtaaaactgaagcctatgggcctatgactcctaagtcaagactcagagccactctgcttatgtctctcataaaatatatttcatgg

SEQ ID NO: 276 - DNA, 344 bp, Homo sapiens
gacaagccacgccaaggccaaagctgaggcagcggaacaggccgccctggctgccaaccaggagtccaacattgctcgcactttggccagggagctggctccggacttctaccagccaggtccggaatatcagaagcccatggaagcccagggagatgtccctggggcagacactaaggcaggtgttgaagacaagctgcttgtcaagaagcatttcccggcaagagaggggcaagtctggggctccaactgggtacagcctgggtgcagttataagcccctttggcttacttggtagaagatggctacttggatgtacctcacttaaagatgttttgtaccac

SEQ ID NO: 277 - DNA, 29 bp, Homo sapiens
  misc_feature 7: n = A,T,C or G
ggctgancacagtgagtcacgcctgtaat

SEQ ID NO: 278 - DNA, 470 bp, Homo sapiens
  misc_feature 439: n = A,T,C or G
gagaaataccatattatccccattttgcagatgaggagacagaagtggagagaggtgaagtgacttgctcaacatcacacagttgccttcccacgtgtgtgagaccattgctgtggaaagaagccgggcctgacttcagggatctggtgtgaaatgactggacccatgcgttctgagtaaacaagagagccccttctggcttctccgggaggaaccaaatggcttcagcattcagctccaaagcccgatggagaccaagagtgatacactgtactcatgatcaactgctcagttctggtttgggcctctgagggctgatggggtttggcagaacctccagcacaatgttgaatggaaatggtgatagtgggcatcttgtcttgtacccagtctcactatgtggaagcttcactatttcacaatgaaggcccagaccggngactcaaacctgtaatcccagcacttttgga

SEQ ID NO: 279 - DNA, 504 bp, Homo sapiens
  misc_feature 464, 469, 491: n = A,T,C or G
atgtgttggctggagctgaagcagacatattggaccatgtggtgacaacgagaattgaggccaccatggcaggacaaggtgctgcagtgaataccacagacaactatagtttcaaaggttttctaccagcaaaagacaagaatttttgaagacactgggatataagaatccagcaaaacctgttgcttgggcttttaattttacgtctggtctccaatggccttgtatccaaccattggcttaggaagaattcttgtgacctgatgccaaatctaaagtttgttgtacaggagcagcccagatttggtgtgttcctctacacaaggaacaattgcctggagacatgattcacagggaggagggagtgccttcctagaagagctatcataaaaagggtacacaagtagatgctcaatcagtgctgactggaatgaaaagaaccaaagggatgaaaagaaggaatngaagntttgcaaaagatgaagctctanatccttgcgacag

SEQ ID NO: 280 - DNA, 509 bp, Homo sapiens
  misc_feature 359, 401, 466: n = A,T,C or G
gagccagtgtcctgggctaaacacaagagtgctgattcccactgtaagttacagtgaagaacttctgctatctgagggcatgtgttttcatcttcaaaaaaggatggacagtccccatgaaccttccctctccaaccacacaggccttgcttctggacatgcagtgataactctctgtttgctggatgaagatcatgttggctctatgcacattcagataaccttctacaccagacacccctggtgattgctctataaatcatattggccaggagaaaggatgttcagttccctaggcttttcatcatggtcaattagggaatcagcccaaaaggtcagcatcactgcccttaaatgangtcacactccatgcactctgagtaccccggaaaagctgtggngctggtgattaatgcatgtgtccagaccctgggtttcaacgaaggcaaatccctggcatacaatnccaacttggctcttcttactgggggggattcttcgagctgggc

SEQ ID NO: 281 - DNA, 490 bp, Homo sapiens
  misc_feature 7, 171, 208, 210, 213, 217, 223, 225, 229, 232, 238, 247,367, 369, 370, 378, 381, 384, 387, 388, 389, 390, 396, 406,443, 465, 475: n = A,T,C or G
gtggcangtaaataaggataagagatgatagtcaggcacgtaggttggaaccaagctgcacacaccgcacagtggagagagacctgatcctgcttagggcagagtgggggaaaggagccagggcctcctcctgctctgatccccaccagctcatgaccttggaccagcccntgacctcgcaacctcgcagaactgaaaaactctatgntntgnacgnacgatnangagnganctttgnaaattggtncttaaacttggaagtgcaacagaagactggagacttcacatagaccattgggcccttcgcccagagtttctgatttagcaggtctgaggtaggacctgagaatttgcattttttgttaangnntccaaaanganctngannnnttttcnttttgggaanaacacttttaaaaaactactgtttcaaaaacaaaaantttggtggttttaaaaggatgnggaacaaganaactttttccaaaag

SEQ ID NO: 282 - DNA, 520 bp, Homo sapiens
  misc_feature 10, 11, 14, 23, 26, 31, 33, 34, 38, 40, 43, 45, 50, 51, 77,80, 136, 153, 159, 167, 174, 179, 181, 196, 197, 200, 206,207, 208, 356, 466, 485, 487, 494: n = A,T,C or G
gttcagccanncantggccctgngangacangnnaagncnccngnctcgnnctgggccctaatgaaaggactcaagngangccacccctgttagcgcgctgagaacatggcttggtgtgctcctctaacttggganagaatagggctgtctgntgtctntaccgcanagggctnacatncnctttacgggatccgnntcngaggannngggccatttctcttcccttatctgtttatgatgcgatatgttccaaagccgatcacatcagccgctgttatggtgaacggaattcactgtgatggcggctgcaccagcagagccgcgtgggcttcatgccacgttacgcggagtctangacggcctcaccccgctggctcgggctccctctcactggggtacacatttatcgggatttatgctttaaaacaagtagttcacattttttttaatgggggaaagtacaanaactttccattttggcggngngacctancaatgggcttaacttttgttttttgt

SEQ ID NO: 283 - DNA, 386 bp, Homo sapiens
gagcaggaagctgcgtggtaatcccgcctgcaaaagctggaagagaggggcggaacgaaagaaccaatcatgagccagagacaaagaacagagtaaccaatccttgggttgaaaatgaagtgggatggaacctgggccaaatagacacttgaaaaaacaaatggaaaaaaaaggttgatgtaagtcccaccctttagatctcctataggacaggattgtggagaatttgctgtcatatcgggacaacctcttcaaggggcggggcttagggaaggggtggggtcttaaagtgggcgggacctagacgaagaaggcggagtccaaatcatcactggtccactgatccgagatgtccaatatcccacttaagatgtaaagtgtggggt

SEQ ID NO: 284 - DNA, 489 bp, Homo sapiens
  misc_feature 387, 399, 409, 412, 427, 459: n = A,T,C or G
caataactatccaccttcgacaccttgtggaccatgaaaacctcaaggatagagcaagggttattcatcgctgtatcgctggtatccagctccatgcctggcccagatgagcagctgagactcaagatattgtttaacttgcgcatgtttgcataggtagtaacagtgaagatgggtctggagcccagcgatctaattactactcagaaacacctgtgtatgcatcgtgctctcaattctccacctcctcgttccaccactgctgctgctgctgctgctgccgccctatcattacaaaccagctcagcttcctcatgggcttgtatttaagcgcctgcctgtcacaccaacttactacagctaaatgatgatgcaaattctccaggnttgcatcaaccncatgaaaaanccnccacctttacttaantttttttttttaaaaaaagaaaaaaacagganggagcttgttgctcaactgacctaagcttt

SEQ ID NO: 285 - DNA, 181 bp, Homo sapiens
aatctttgagtccacgtggaggaaggaaggagaagaggagaagactgttttccaggatggaaagggagcctcgctttctctttaggtggattacagaaattggttgaattctccctgccctggagaaaagtcaatttattttttatgttaaagatttaggctcttcctgagggctactatg

SEQ ID NO: 286 - DNA, 319 bp, Homo sapiens
agaaaccaatcggacacatggccgtggcagttaattctataggctccccacctggataacacccaagctcaatgcagccccacccaaagccaataccttttctccaacctgccccttctcccaggaaagggcagcctgtcttctttggtaccccatcatccacccaattacccagagtagaaaattcagtattatccccctatctaagcagtcgcccagtctggctgcatctactttctcaatctgtttcttttttgtcctcctgtagtatcttaaaaacataaagggaaaaagatataaatgccaagcaaaggacttg

SEQ ID NO: 287 - DNA, 230 bp, Homo sapiens
cagaaaatggctcctcaattttctatctcatgtggaggcaacatttctgcatcagattcagcctgtgggcaaaggaatgaggcttcttctacgatccttcaggctggcccttcctgaagtagcaaagcatgtgtcattataaaacatgattgtaactcctctttcagtgccactgattttgtcgtgtgggaaatttttggcaggttttggcaataaagtgtctatcaagc

SEQ ID NO: 288 - DNA, 329 bp, Homo sapiens
agggccaccacagatccgggcatcctgatcaacattcagtggcaagcctggaggggcaatgcttgcctcccattgtatggcaggccagatatgttcctggcccatcagaagcctccttctggatgcagtctataagccactgtgatggatgagaagagcccaggatggaggtgaaagtctggaactggaatctgagcccttatttttctgactcactgttttaccttggaagaatcactgaagttttctgcatctctgtttcctcatatgtttaaaaaagaaagcacttaaccttggtggatgtgaaaaataaatgaaataatttctag

SEQ ID NO: 289 - DNA, 452 bp, Homo sapiens
  misc_feature 438: n = A,T,C or G
gaaatgcatcttatagcagagagctggctacctgccaaaccaaacaatccctgagactgcggcagggctgggaagcaagctgagctgccacgctgctaacttgtcaaacatacataccggctttgcttaacaacaatgcgacacgtgcctgctagaagcctaaggaaccaacatcagaagacagatgagctataaatacttagaaagagtacaatccctcgatcaaccaaccaccccaaactttcttcatcctgttcttgaagaagtgcttctttactgggagcgtgacacattcagacctaaggagccactgagaaatgcagcaaataaagcatagagagcacatttgaataaaaggaccagagaaccaggaaggaacatcaagacatgagatctacagaatcaaagagaaagccctcacattatatcatgagattncaatggcagaaggc

SEQ ID NO: 290 - DNA, 476 bp, Homo sapiens
  misc_feature 413, 433: n = A,T,C or G
gtgaatcccattctcatttttgcagtatccaagagctggatgcctacatgatgcagtccacagtggctgagcaccttctgtccctgggatctcagactctgcctgccacagagcagatgactggaaaaccctccccacttgctgtcatcattcctgaaaggtcttcaggtgtgccagcaattttcagactgaatatctacaccagaaaagcacataactaccatgagcataagacgtgggagtgccatggagtgaccatagaagtatagacagtaagatcacagccagatacaacttcttgttttatagatgagagacctgaggcccagaaagaggaaggcacttgcccatggtcacacagtgagttagtgagactggagcccaactcttcaggggtctgggctggggcttanccaaggctggttaggcaatnggctttcctggggttctgggcaaatcattttttgcctactctg

SEQ ID NO: 291 - DNA, 458 bp, Homo sapiens
  misc_feature 252, 256, 270, 295, 311, 386, 414: n = A,T,C or G
gtcctgctgaggatccctggtgcccagtagggaacaccgtgaggaggaggattaagaaaggcaccctttccactgatttgcatcgccatttgtacatggagtttggctacagcaaaatccgttgctatctcaccagctacaagaagcaaagaacgaattgcaattcatttttgtgctctaggacccggttgaggtctccttgctgacaaaaaaggaaatgacttctgaagacatgaaaaaaaaaaacagggngaanacaaattgggttanaataacccatgacctaaatcattanactttgactaatgaanaactgccttttaacagagttaaaattgacagcaccatggcctcacacccaacaggggtttgaggctggacccttntttgacaaacgatgcccttgattacccncaaaatacccatcacagcattatttataatattcctggccaaag

SEQ ID NO: 292 - DNA, 471 bp, Homo sapiens
  misc_feature 371, 395, 441, 450: n = A,T,C or G
gaatgcagctgtcaacagctattctaagtattgttgacttgggtgaggagatttgtgtccatgtttgaaaatatgacatgacacgaagcaaagagaatttcaaaactcctgaccaaagctggtacagagaaaaactgactgctcaaagaactccatcagatctttccagcaatctgtgcatggagcgtgcacttgaaaagcaagtgtgttttgagtgagcaggaggacagattcagccacagagggcaaggagatcctcctgttgccacatttggaaggtgaaccattagctgccttcctggcagatgcctactgggggtctggagcttggaggtgacacatggagcatgtcctcctccactttcttcctntgtcagcttccaagaaaaccaganctggaaatcaaaaggataccccagaggggcagtagggccctcccanatggctgancagatgctggcaccatgcctt

SEQ ID NO: 293 - DNA, 349 bp, Homo sapiens
aagcttcaaggactgaatcctgacaggaaacaggcacctccaggattctctccccagcagaagattacttcaagaccggagttccctctggactgactgcaagattgaatgtgattgatttgtaacctgtcaggtccacaatggtgccatggaacaataattcaagataagccatcagagcaagtcacaccatttggcacctcctagcccccttcctctcttgcattccaagcccctcttcttaaacccttgccgtctctccagaaattggaaattggcaatttttggaaaggattccagccactttccccctcgctggcaacggataataaaaatcactttttttttt

SEQ ID NO: 294 - DNA, 226 bp, Homo sapiens
  misc_feature 47, 48, 50, 59, 60, 68, 159: n = A,T,C or G
aaaaagaacaaatcacctgctgcctcggcaggacaggatttctgccnntnccacctgtnngcagccgntcatggcttccagacaaagtgggggcccggggcctgcagaacagtcggccacattcaccagcctgtctctcctctggacctcttggcacangcttttactctccagactgtgtgtgtttggttgaattgaaataaacacagcaggattttgttttatt

SEQ ID NO: 295 - DNA, 217 bp, Homo sapiens
  misc_feature 76, 80, 91, 112: n = A,T,C or G
gtaaatccaagagtcaccaaatctttcagcttttcagctaaagaaagaaacaagtgaagcaatgggcagaaagtgntggntttcattaccnagagccgtcttcttccagccnaaatgtaatttacatctgagtgtttgggttcatctgtcacacgagtattatacaaccccaccacttaccctgaaaataaatatgagctcctcattcaggtaaatg

SEQ ID NO: 296 - DNA, 407 bp, Homo sapiens
ttggtgaccctgaggcacagaaagctgagggaatttgttcgaagtcacacagctgggtaagaaagttggtggttggttgttgccactggcctacggcttttgtccagagaagacgggaatgggggtccagttacccaaccccttcagaacagatggtttctcatgcccatggaccttggttacggagtgtgaacaggattctcctaaatatttcaacttcggaagaccggattgaaagtcatctcaattaagcaaggactgagagtgtgcaaatattatttgaacgttggttaacttttccttaaatggaaatgaatgagcagtaaagtcactttgatgaatcttatacagagcctctgtcccagagtcctgaaacttcacctgatggtcataaaagaatcaaaagt

SEQ ID NO: 297 - DNA, 498 bp, Homo sapiens
tgggagagggctggaagtccattccaaccacagaatacagtcccttcatggaaggaaagtaatttaacagcaacagtccaggaatcagacaagctacggtcccagaggcaagcgttggaggggccttctgctccacggagacactgactccacgcagggtactgaccagggcaggggaccagagatgaatcaactccagcccgggagctcaccgtccagcaggggagataaggcagatggaaaagtaactataaaataaggcagacggtgataagagttacacaggagatacagatagcaggcagtgggagttcagagcagagaggagtctgggggatggatgttaggggagattcagatgaaggggagcacttactggctttcctccccaagaggtgccctaggatccatccagaaagatcttgcggagcccacagagtcccaacgggaacttgtgcttcttggatggaccccttacccatactttacccactttaa

SEQ ID NO: 298 - DNA, 441 bp, Homo sapiens
  misc_feature 313, 349, 364, 373, 392, 394, 408, 410, 412, 413, 419: n = A,T,C or G
actaagagtgttcaaagaagaggaatcacactttggccagcagtatacctgcagccctgcggctaaagtttgctgaatgagaatataagtgggctctcattttgaatataaggaaaatctgtaccagaaatgccaaacaactgaattcaaaatgaatttcttggaactcaacactcaaaatcagagatggttcagagagaaggtatctactgctaatttctaactaaatgaaagggcttctgcttctgagagcaatgatacccggaacaggaacgaaatgctgctagagaacagtgctggaagtgtgtcgacnaaactggcttcttggtctagtctatgccactttccntggataatggagagnccatgctanggggagaaaagccaatcananggcttcagctgggncngnnttaaanggaatacatcaatgggaccggg

SEQ ID NO: 299 - DNA, 593 bp, Homo sapiens
  misc_feature 69, 87, 89, 94, 97, 101, 104, 108, 110, 119, 200, 270, 285,301, 331, 347, 362, 378, 380, 411, 435, 470, 494, 507, 511,513, 526, 527, 528, 533, 543, 544, 547, 561, 574: n = A,T,C or G
gactctggggactccttcttaaatcaaactgaaggaccccagcctttttttcgccccgaaagaattaangtcgggaatgccttcccnanaattnganggangtnccgntnccggggggncatttttctttgtgggggtcaattggggcgggtggttggcaataacaacccaaaatcttgcggaatcttgtggctttttcntcaaaatgggccagaaggacgaacaagcacttgtttccccaaggcatttttaaaaaaaaagttccggagnaaccaaaactggtcncaggagggatgaatgnaaattcactgtatcttaaaggggtgggggnaagcctgatgcccctnctgtattagagcccnccatgattcttacagntnggggggaacaacataatgcccatacatgaanctggcttgggggctttcatttttncccaagaaaccaaggaaggggactttaagtcattncccaaccaatcgctttgggttcangtttcatttcaancttntnttttgggacccannnaattnttgataaaannaancccaagcttctttnttttggggggatnaaataatttaattggcctt

SEQ ID NO: 300 - DNA, 537 bp, Homo sapiens
  misc_feature 27, 30, 32, 34, 44, 47, 48, 54, 61, 88, 90, 112, 116, 133,141, 304, 324, 326, 337, 365, 399, 424, 437, 440, 456, 470,471, 481, 487, 488, 495, 523: n = A,T,C or G
tgggggctcctgctttagtccgaactnggntntngttttttttnaannaaactngggcctngcttttatggtttattgggccaaaaanancttactggggaaccttttcccnaccnccaggcttccccgagancttccacnattgaaaaaggttctagggggcgcttaattaatggatggtgggatcctttaagggagaaaatcaaaggtccccccttagagggacatttgacttcttcgtggcagcagggggggaattggattgggaggtaaagaaagaagctgtgagccccagaatgaattnctggaaccagccccaagaangnggaaaggtganggaaccagattcttagaagatgacttanggggaataagccaggagcttaatccacttctggngagactcttttttaagaaaaaaggngctccaaaatttnccnatcccaaatttaagtnttgaaaagccaggnnttttggtttntaatgnngggaggnaaataatttaaaacatttcccccctttngaagggttaacccg

SEQ ID NO: 301 - DNA, 270 bp, Homo sapiens
gagagaaaataaaagctcagagaagttaagcgacttgctcgagaagctacaaagtggggcagcctggacttgaacacagacagtctgactccaaagccctccaaagatgtaggttaattttaacctacatctcccagaaaatgagcaacaaaggatgtccagccctccagcaaactagtttaagaaagaaactgtctttcttttcttctgtacttgaggtggggtgggggcagggaataaacaataatcatgcatgcgcatgatttaaac

SEQ ID NO: 302 - DNA, 157 bp, Homo sapiens
  misc_feature 98: n = A,T,C or G
gacgtctggggagctcctgcattaagtcagaaactgagacatggagccttgctatgttgcccagggctgggtctttgaactcctgggagtcaaagtgnatccttccttttttggccctccccaaaagcactggggattacaagatgtgaagcccact

SEQ ID NO: 303 - DNA, 200 bp, Homo sapiens
  misc_feature 38, 55, 63, 103: n = A,T,C or G
caagaaactgagaaatgcctacccgcaggaaatggggntgggctttttttagccntgctggantgtgaacaactggtggaatggtgccctggcaaccaaccangggaaaagggcaaatggtttattatttaaagggtggaattttctttggtggaaccaaaaaataaaaaataccaaaaattttaacccttttctttttt

SEQ ID NO: 304 - DNA, 284 bp, Homo sapiens
gatgatgaaactcccatggggccagccacagcagtaaccagactcagaaatggacattcttcacactgagctgcatcaacccagggagaagaagaggagaggcaacacgccatattttctaatgagttaaagcctaatttaatctggaaataactaatgttgactagtgtgtttcccctaaaataattgcctctgatggtcaattttatagctaaacctaaaaaagatgatttaggaaacactgagaagttcatccctcttcccacaataaaaatatactttgc

SEQ ID NO: 305 - DNA, 353 bp, Homo sapiens
aggactgagaggagaaaatgagacactgagtgggactcagggattgctccaggccacacagtcagcaggaggcaaagcccagattcaaatgcagattactcagctccacaatccacatcctcacaggaggctgcactccttgcccaagcgtcagacaggagcaaagagaaagaaggcaaccagctggctactttcttcccttcttggatgcctccaacagggtgagaaggactaaacaaatgaccaagtgtcatcccattttggacatacttaaaacaccccatggaatttttattctgactttcttctgcctgtgtggcatttatgtttaaataaaagagaattcaactcgt

SEQ ID NO: 306 - DNA, 423 bp, Homo sapiens
  misc_feature 9, 33, 37, 66, 123: n = A,T,C or G
atcctgcgnggtgtggctgaacttcccacccangganttgaccagactttgtcaacagccattcangaactggcacaatggactcacagataagattccaggggaagaggacatgttgtcacnaacacttaggacttgaaatcctggcttgtggaggatagcatgacctcttctcagatctgcaaaaatgctgatgggcagattcaaaagagtcaacaataacttcgctctgacttggtaaaaactgcttttggaagagattctgtttgggaaatttgtgggcctgagttaccagtcatctgttcctgccacaataactgtcatcattgcttcgaagcaatgtttggcttggagcagtcccgaatgagctgcctatcacatgttgaccataaaataagaagaataaataactggcacaaactg

SEQ ID NO: 307 - DNA, 431 bp, Homo sapiens
  misc_feature 363, 364, 365, 367, 368, 374, 375, 381, 385, 411, 413: n = A,T,C or G
ataaagaaccctcttaggatggtgaacagaaacactgaagctgggatagccccctgtcaggggccatttgtcatttccacaggccaagaacctggacgctgtccccacattggggaaccctccaatgcataagccaaatgggaactggaaacacttccttgttcccccaaccccagggctctctctgcctgtcacacacgcctgccccagcagtggaattcagagtccgcgaacgaagcagcaggaactgggcggcagtcgctgtttcaagattcaaaagcaccagcccaaacacaaaaccagtgtgtactccgtggacagaaagttctgagcagcgccggtctagatgaattattaaattgnnnannattctnncaaggngtancccccattggaacccagttttattantncccgaaatatattaaatt

SEQ ID NO: 308 - DNA, 333 bp, Homo sapiens
gaagaagcaccgtgggggactctcactgcaaagaagaacaggaccattatcaacactcctcccctctgttccccaaagtcccctcctgaccgcagcatcaatcttccacgctggcccggccggaggtggtgccactggcagatttaaatgagagcatgaaggtgggacctccattactggattagtgtccttataagaagaggaagagaccagagctcactctccccaccacgtgaggatacagtgagaaggtggctgtctgcaagccaagagccctcacccaaacagaatctgctggtatcttgatgttggattttctagcctccaggactg

SEQ ID NO: 309 - DNA, 349 bp, Homo sapiens
  misc_feature 276, 297, 309, 322, 324: n = A,T,C or G
ctgggtttccctatccccgtgggcacgctggtgtgccgtgtgttcttgccaatggaatgcaagtagaagcatgtgccatttctgagaagccagataaaacatgttaggcgggctccttcatgctctcttctcctcttctttctggaatggcgatggccaaaagaaccttggaaggcataaactgaagacagcttttaccacgaattctttcaagaagatgtgaaaaagatccacccctcaacctgacactcccaacctggactgttaccgtgaaangagaaataatcatgtatttgngttgcttgagcntttaacccttttngntaaaaggtaaattgcttgagacttt

SEQ ID NO: 310 - DNA, 157 bp, Homo sapiens
gtgaagaaactaagaatcagaggagttctaactgagccatgaggactcgattcctgaaaaccttatttataaaaaacaggaatgggaactaaaacaaggcaacctgtgcaagcccttacaagtttttcatgtattacagtaaaaggtaaagcaactc

SEQ ID NO: 311 - DNA, 217 bp, Homo sapiens
gaatgtgcttgccctccacttcctctctcctcttcctatggggctggaaatatgtgggatttggagtgagccaggttccacaatgctgatgagtacaatatttcaggagacagcagaacagcatgaagaaagaaacctggatctgcaagtgcccagcagtgagcagaccccaccaacactgggccactgcttctggaccatcctaataaagtaatgc

SEQ ID NO: 312 - DNA, 650 bp, Homo sapiens
  misc_feature 11, 19, 27, 33, 34, 35, 36, 37, 38, 41, 43, 46, 48, 53, 58,66, 68, 77, 79, 85, 90, 95, 112, 118, 121, 126, 127, 134,136, 137, 146, 181, 182, 183, 188, 191, 194, 198, 219, 320,493, 517, 551, 559, 569, 574, 579, 613, 629, 634: n = A,T,C or G
tgggccgtatntaaaaagnccatgtcnacagcnnnnnngcnanccntnatganaaaantggaaaantnagggcctgntnggagcnacccnaaatntttctattcttccgcanctgccnatnactgnnggtagangnncgggagcancatcctatgaagaaaggaactagctcactcggtannnggacnacnatntttnatcctttaaccctcaaggggnagtcattctcctgactgctaaccttacttttgtaagctccttgaacacagatcactaagaattctagaggagctattcccagaagacatacaaagactgcngatccaaatgactcaagaggtgaaatgtaatgtatgctgtggtgtacttctcagatgccttcaccttaggtctgaaatactcattccccaacaatgcctccatgctaaaaagtgttggtaactaatgggtctcaactgagcccctctctaagcattaccctggagaagcccanccaaagggtaccttacccaaagancacacccgtatccctggagtcagctcacattcantggactgntcaaagcccnagcantaaancttgggggcagaaattaatgcaagggaaagaccncttttgaaaaggcccngattncctggggaactggact

SEQ ID NO: 313 - DNA, 541 bp, Homo sapiens
  misc_feature 3, 23, 33, 326, 342, 352, 358, 427, 465, 471, 492, 495, 498,521, 528: n = A,T,C or G
ctnaactgatggacttggctagnccgctgccanccacatggagtgggaggatcacggagcctgaagctgagaggccacagcactgcacctgacatatattaccaacttgccatgcaacttcatctcattgactccgcattcccattttttggagtggatcacctgcagttcccttgacaactgagtgtctgtatttttctgtatcgtccagtgtgatgacaactgtctacacaaccaagtctggccagcactgaacacactcagcttccccacagtgctccaagtctcaaagcccaaactgcagccaaatctttggcaggggttgncctctggtcaggccanaacacctttnttgaangacctttctgaacatttttaaaccattcgatgaatgaccctaaattcttggcgcataatttgggactgntgccatcacgccagaaacatttattaaacacttactgngtcagngctcaagacctgccatcttgnttnatnttgacaacagtgatgcacaatanggggtgncatttcccgtttc

SEQ ID NO: 314 - DNA, 295 bp, Homo sapiens
gcccttcctgcttgctcactctgatgatgcaagctgcaaccctgtaagctgttctatagaaagacccacatggcaagtacacaaggatggctttggccaacagcctgtgaggaactgaatcctgccaatatccacgagtaagcttagaaacggaagttctaagctccctactctggcctggagatgatactgaccaacaccttgaatgcagccttgtgagggaccccgaaccagagacccagctaagccttgctcatattcctgacccatgagaacaatgagatgataaatgttg

SEQ ID NO: 315 - DNA, 161 bp, Homo sapiens
gttaagatctaagaacgttctaaatctctgataggatttctttcaagttaagaatgaagagtcaaaaaggaaaaaaaaagaagcactttgccaaagacaaacctgaaccagcaacagaggaataacagtaaaacatgcaattaaataataatcaaatagcc

SEQ ID NO: 316 - DNA, 277 bp, Homo sapiens
gacgcaagctgacctggtgcaacgaagctcccatccaaccaaaatgggccagattgtggttaatggaccttaccaagatttcctacagacaccacaccatcgggattattgattggaagtgtacgccactacacttgactgaacttgaagttgtagactttctcaaatgcttcaagaggcatttgatagcatcattgtttataaacagggaaaaactggaggaaacctaaatgtctaacaactggaaaatggttaaataaattgtggtacagccatt

SEQ ID NO: 317 - DNA, 135 bp, Homo sapiens
  misc_feature 43: n = A,T,C or G
gtacccagtgcacgtcctgatctccagctctccagcggcttanaacagacacagaatgggccgggaccagggacccaccagagacgtctgtagttaatagctggcgctcttccactaataaagttttattgaaat

SEQ ID NO: 318 - DNA, 562 bp, Homo sapiens
  misc_feature 323, 469, 484, 517, 520: n = A,T,C or G
taccacgacaacagcctaaccccaactaaggtaaactctgccaccaaacatgcctgggaatggagaagggtctgcagatgagaaccccttctggttctatgattcaaatcttcattcactcaaagcaggaaccaaatccagtgctcctccattgttggaataaatgctctttgcctgaatgctatttgtggtcttcgtagaatggagagtaactgaaggccccaccggaaatcaattttatgtaagcttttcattctctggcctcaagtatttctaaaatgtacctttctatgcaggctacttattcaggcaactattttcangggaagatactcaaatgaaaatagagaatcccttttggccttttgctaatatttcatttgtcaaaactttgatagtctgacaaagtctttaccatgagattggtaaactcacggaagccaaactgtctgggatgcgacttcaactncctacttacgaactncataataatggcctaacctgcctatacctcaanttnccatctataaagacaataaaagccctatttcctcaaaaaaag

SEQ ID NO: 319 - DNA, 362 bp, Homo sapiens
  misc_feature 331, 340: n = A,T,C or G
aaataacacggaaagacaggcctgttctcccggaactgacagtcggaggggaaaaagaaggaaggatgctgttcgaatacaaaggaaggggatcttacccaggctggatgggagaatagaacatatggtgtttccattctctctccagtctttcaaccccatcatgtttcctgccctggagagttgctttgactatcagagaaggcatactataatggcttagttggagcaaataaagaggcaggaataagcctgtttgctgaaaggaggtggaaaagccgtgtgcagagccattatcagaagtacccactggaccaaggccttccgtggnttccagcanaaaagtaaccttgattatttgt

SEQ ID NO: 320 - DNA, 410 bp, Homo sapiens
  misc_feature 305, 382: n = A,T,C or G
aaagatccagattacctgaagctgtggttggacacttttgtttctagctatgaacaatttttagacgttgactttgaaaagctgcctaccagggtagatgatatgcctccaggaatatctctgcttcctgataatattctgcaggttctgaggatccagcttctacggtgtgttcagaaaatggcagatgggttagaggaacaacagcaagccttgtcaattttgcttgtcaagttcttcattattctttgcagaaatctatcaaatgtggaagaaattgggacttgctcgtacattaattatgncatcaccatgacaacgctctatattcagcaattaaaaagcaaaaaaaaagaaaaggccagcgaggccaattcagctnggacttaaccaggctgaacttgctcaaa

SEQ ID NO: 321 - DNA, 27 bp, Homo sapiens
tgttttttaagcaaaaaagaaaaaagg

SEQ ID NO: 322 - DNA, 207 bp, Homo sapiens
agacctgtattgccttaacactcccagcaatgaccacctgcaagcttgcgctgcgactcccgtccgaagacatgcgggccagtatgagcggagaggttcccagcaccgtcacaagaccctgtgctattattttagactcacctgtggctgttgacaacaccacacacatgaaatgatgctcaccagaatcaaaatactcagctaaac

SEQ ID NO: 323 - DNA, 400 bp, Homo sapiens
  misc_feature 4, 5, 6, 31, 41, 46: n = A,T,C or G
taannngatgtacatggactgatcagacttnctgaccttgngacanatcctgccagtaacatgagaggaaatgagaacgaggctttggagcacagcattggattgctcatgcagaacaccacccagtgccctttccctctgtcacaatgaacagccatgctgcaggtgacggctgctctgtcaacatggatccggcagggcagatgagtggatcccccagcggactcatgagagagcaaacaaaaagtccatatgtgttgtgctaatccactgagattgtgttggttgttacggagcctaacctagcctatcccgacacgaggatcagacatgataatcaaatgtgtttataaagtgttggatggaaatattctgacaacattaaaagactctacccaag

SEQ ID NO: 324 - DNA, 197 bp, Homo sapiens
gaggcatgaggaggtgagagatggaaagaatgctgtctgtcatttggagtcagaaggaaaagaaggttgagggtctgccagctctgctctagtggttttttcctgtttcaccttttacaaaatcgagataatcgtttctacttggtagcgatattgtgaggtgtaaaatggattaatacatgcaaaatgcttaaagc

SEQ ID NO: 325 - DNA, 360 bp, Homo sapiens
  misc_feature 316, 321, 327, 330: n = A,T,C or G
gtgaatggaccctgagagggcccagccatgtgatggaatgagccatgatccctgagtcctcacctcagggagagatgtgcagaagagccacccaagtggtgatgtgctggtaaacatttagtgacccatttgaggtgtggggggaggctctaactggtaacatttgttaatttctgtaatgcatactcctactaaggctgcttttaggcaaccaacgtgatgtcactgaacacagtttggaatggatgcacataatcagttctcatgatccaggatgaaccagccctagcataccactgcccctaacccacatatnactgngcatcnttnaaaaataaacatattggggttaagcctttg

SEQ ID NO: 326 - DNA, 428 bp, Homo sapiens
aataaacctgaagttctgtgcgcaccgaagacataaatgacataaatgttgatggaaggagaaggatttgaggaaggacgagagtctgaggaacaagaaaggactgcagtagtgaaacagcggaagaaacgagatcatttttctcttataaaaattctgtaaacacagccattctttctgtatttgtaatttgaggaccgactggagttattcctgagagggctatgttcctgagagaacaaaattattgtttttgaaactctagagagaactgctctggcaaaagaaatgtatcttttcatctacagccattctgaggtgaaagatctcatgatcactctggactatacaacccacaagcagacttcaaggatacctacaggaaccccagtagtcctgattgatcacacaggccctaaagaccctat

SEQ ID NO: 327 - DNA, 431 bp, Homo sapiens
cagtctactatgggttcataacaaatgagtccccacatttacatcaaactacctcggcctagtccttgtcttcaggaagaagtacatttacactctacaaatcaacaagaaaaactctcagaataggaagcctatgaaaaagctatctttatttctcgttgtgtaagagcccatttctaatcctgacgtactcccgttttaccaagtgcagtggcatgtgctgtagtcccagctactgagaaggctgaatcaggaggattgtttgaagccagaagttcaagttcaacctgggcaatatagtgagacaccatctcaaaacaagcaaacaaaaaagaatcatcacttgagtcctttctcaacctcagaaagggtcattatctcttcaccttacaatgagaaacctcaactactggtcaagcttaacagctaac

SEQ ID NO: 328 - DNA, 90 bp, Homo sapiens
ggttgcagaacgtataaaaacacatgaaaaatgatcacaacagtacttggcacataggaagtactccgtaaatgttggctgatccaccac

SEQ ID NO: 329 - DNA, 212 bp, Homo sapiens
agaactgaggactcagacctgggagaacacgccactgcccagacacgttcagcgacagataaaacagtataacattttgcaaaggcaaattcctcctcttctgctgtagaaaaacttggtttcttcttcatacacactgagtccttctgctcataatgctggtcctaaacaccttaatccaaaagcagccaataaaaagtttttaaaagtcc

SEQ ID NO: 330 - DNA, 256 bp, Homo sapiens
gtgtcagaaaatgccacagagcacagaagacaagaagagctccctgctgcatatattgcatcttccgttgggcacagtttcactgatgttatctgtaaacagaaagggtgagacgtgatgactcagccaaccctccaaatcctgagggtcatctatgctgccggaggcagaaagtgtcactcccgtttcactccccgcagctgtgttgtttggaatttctgaagattttatttttgatgagcaactttgggagacg

SEQ ID NO: 331 - DNA, 386 bp, Homo sapiens
tgatggtcgccccattgcgtatagaggaaatggaggaaaacttggaagtaccgccttccatacaaagtcaaggatcgagaccttcctctccgtgttccagaatccctcaggaaatacgcgcatgccttcgcatctagagcaagcgctgcaagaattcacagaacggccagaagttccccatcccgctggtggcactcactgcgttaggcgctcagcctccagtccgggccgctttggcttgaagacggccgttttccttcctgatacctgcttctagtctttctgcaacttctggattcctgtcattcttatacctgctctgggcagccttccattcattctgcgaattccctgaagcttttcaataaattgcttttctccaattt

SEQ ID NO: 332 - DNA, 200 bp, Homo sapiens
catgcggacaccaccccaagggagcaatcaggagaagcaggcgcgcaaggccccggaagcatatgccagcgtagaagaccccaagtcaaaggtcaaacagggcacttgatcactcaagtcccccgctagacccccttctgcgtgtactttactttcgttcctgctctaaaatgttgtaataaactttcactcctgctcgc

SEQ ID NO: 333 - DNA, 42 bp, Homo sapiens
ttggctagagatttactacatccgtccttggaagaggaaaag

SEQ ID NO: 334 - DNA, 448 bp, Homo sapiens
gtagatgggccagacgagtctaagaggcagctccgggcatctctgagcattgacttgcggacgttccccagccctggagctccatccaggctgggaagagggaggaccgtggagattttcatgagtgtcccagcagtgagaatggactcttgccgggcagacagacacagcaaggctctcctgggtgctgggggaaactgaagctgtcagtgtcagctccgaaagctctttggagaggcttcccaaggtgggatgcaccgtggaccaggctccaagtatcgtcagaactactggaagattgttttcaagataatctggaacaggaagagaagacacaaaagccccagaatcagagcagctctttgcaggaatttgattaaggaaatgagacagggctggatgcagtggctcacgtctgcaaccccaacccttcgggaggctggaggtg

SEQ ID NO: 335 - DNA, 246 bp, Homo sapiens
atccccgctgtttttctgcgtgatgctgattgctggctctggttcccaggaggcgcccaagatcggattaactgccagcttcctgatgcacagccttgttatcagcgcctatatccttgttcagcaaagtgcctctccaccaacttaatgttcttttcaccaccccatttctgcacgatgtagtcacagtaagacacagagtgtgcagtcccgatcccagtgctacataataaagatccagagctc

SEQ ID NO: 336 - DNA, 356 bp, Homo sapiens
gcctgcccatggctgctcatggaacaatcggctagcgtttcctcccctctgagatccataaaagccggcagctcagccagagcagggcagagggcagaggacagagagatgatgggatgacccgctgcagagaggagctaccctcctgctgagagcttcagagacctgcagagacttccaaatgatctgcctgcagagatgagccacgctttccagggctttctctctgctgagagctgagtacttgaggagagggcctgcctaggagccgacctgactacagagaggatctgcccactgtgggtctcttctgttctaacactaaataaagctcctctttatcttcttcacccttc

SEQ ID NO: 337 - DNA, 225 bp, Homo sapiens
cctgctagcagagatgaataacgcgctgaagaagcaagtccctggagagacaggaagagatgagagagacccccaagttgtgtgatcacctccagcacactggagactgagccgtttcacaaggtgtcaaacctacattgcagcctgaaggatgtcttcacttcctcctgctccttcgccttgtatccttcatagatttttcccgcaataaaactttgcatatct

SEQ ID NO: 338 - DNA, 431 bp, Homo sapiens
  misc_feature 403: n = A,T,C or G
atctttaaattaactaaggatgaggaaaagtttgtgttcagttcaagatcacaatatatggagaccaaagagctgggtgtaagtccaggttctagccaaactgcatcagtttcctgcccttggaaacaaatgaaagcacagagacactcagagaaaagctgccatcagcaatacatatttcaagcggagagcaatggctaacctgcttctttcgggggcccaaaggaatgctgccattggaaggcacttgacgagatgatatgtgtcccagcatcagtatcatcattcccaggtgaaagacgggagagagctgctctgtgtcacaaccctgttcttaatgctactcaataaatttctatctggcttgagggcaaagaacttgacacaatttacttagaatccnaactggaaataataaaaatctttcatag

SEQ ID NO: 339 - DNA, 244 bp, Homo sapiens
  misc_feature 11, 13, 35, 59, 63, 70, 97, 108, 164, 169, 184, 190, 191,203: n = A,T,C or G
gctggagtgcnanggcacaatcttggctcactgcnaccaagagaagagggggaaagaangganaaggggnggaaggaagatggaagagcaggagctncaaaaaaactntccgctttgccacctggaatgtccacccaggataaaaagatccaagctcttctganactgncttttgaccttctanaatgcnnagacaggacggngattgtgccctgaaagatcctcccaataaagatctcccttt

SEQ ID NO: 340 - DNA, 378 bp, Homo sapiens
  misc_feature 210, 258, 319: n = A,T,C or G
gacccgcattaagtccagagaaggcagcaaagctggtaaagaaatactacaatccttctggagaccagaatcctgacttctggatgtgacaacaatctaacaggattctctgatgcagactagcaggaggtatgaacacccctcccaagtcttcctctgccaatatgaaaagctgctccacaaatcttgcccctatacgtagagggcgantgaagagaacactgatctcaatttcaagaagaaactaaagaacatctncagatttttcttctatctgaagagtcaaaactaattaaactgcaataactttctaccttgncttcaaatctctttacgttcaaaacttccattaacccatttcatataatctccactacc

SEQ ID NO: 341 - DNA, 239 bp, Homo sapiens
atggcggccatcaatgttgattcagaagtgaagccaaaacataatttcctggcactattctggaaggaaaataagtgagatagagtaaagatgactacatagccaattagaaaaagcaactaccacctccactccaaaaaagtcatgtaaataacttctagtctgtgactcgtcttcaccattctgtgcactggctttaaaggagcgttttacactcaaattaaatattctctttgctc

SEQ ID NO: 342 - DNA, 308 bp, Homo sapiens
gcacatattcatgtatggtcactttaacgcagtgctaccgtctgagacgtgtcggacaaaggcctgggcagaggggctagaaaccatgtatcaccaaagccaacttctttcccagatttcagaattgctggttcaactgcaaaagtaggaaggcaatgagtaatttctgctctgctggactagattaccattaactaccatcatgacttcagaagatgctgtcacgatgaaattcatttctgctgcctaaccccataataaggctggctgttctctttaagtaaaatgactaagctattgatcttttc

SEQ ID NO: 343 - DNA, 439 bp, Homo sapiens
  misc_feature 224, 389: n = A,T,C or G
agaatcagaaaatcaggcaatgcagagaaaggaagagcactacctccacagagcagaaggaaatccagggaaaggctggtaggaaccaggagctgaagacagagctgtgcgccttcctggccatcctccttaaatctgagatgggaatccagccattgcaccagtacatggatctgcaatttttttcttcttcaaaggaccaaacggtgaatactttaggcatnggggaccataaagttgctgtcacaactattcatctttgtcactgtagcttaaaaacagccatacacaataggtgtacatgccaaatgggcatggcagactaaaaagactaaaatgacaaagcctctatgaactaggagaagaaaggcagtaagggagattaaacngagctgaaacaaaaagggtgatgcataaaagaaagagttggaaaaagatg

SEQ ID NO: 344 - DNA, 463 bp, Homo sapiens
  misc_feature 5, 6, 7, 23, 27, 32, 55, 398: n = A,T,C or G
ctaannngattaggcatagaccnaaantgaanactctggatgtggtggctggctncttgtgaagaagaattcaatcagattccatttgattaatctgcattgagatcctagtatgtgtccgacactatgcagaaatacttcactccctcttccatggcagaccacgatgaactagggtttgctgttttcacggcttctgtcactgttggagctgaggctgaggctgcagcaggagctcctctggccccgaggcaagagacatgttctctgcatccccaggggacccaaagcaacttctggtttgggttaaagaggacttgggtgaccccaccctgccagtcatccaccctctggcagccagggcggcagcaggggagggggcagaaggctgccacagngcttctctcccctgccatttcctctgcagctccctctctggccctgtttttcagacctctaataa

SEQ ID NO: 345 - DNA, 352 bp, Homo sapiens
gtcttatttttttctactcatgagccaagatgcagagagtatttctgcagtcagaggagagatggtccttacaaattttgcaattggaaggatgaggcaaaatgaggccaaagatgaaaaaaccaaggcctggataactaattcacagccacacaagtatttagtcgcaaaaaatggtaatagcatgcagctctctctgttcagtgcccttttcaggatgtgaagaaagatatctgtataaatatgagaagtccttcccaaataagtaaagtaactggcataactgaggagctctttggcaaatctactctgtataccaactcaagaaaaacagggaaaaaaccccaatctg

SEQ ID NO: 346 - DNA, 270 bp, Homo sapiens
  misc_feature 69, 73, 115, 132, 133, 248: n = A,T,C or G
aggcaaaaaacaggacctagatctggaaatcaaaagtggaagcagaaaattgagcaatcagcctaccangtcnagtggggcaacagactacgctcacggattctgctcacaacancgggaataacagaccannagaagaactgcagagcatccctctctcccccgttcacccgtgccacgagcacgtgagtgcatccacaggcagcacccagtctcctgttccactgactccagcgtccactcactgngagcctactaagtggccacatg

SEQ ID NO: 347 - DNA, 236 bp, Homo sapiens
atgggaccatctagttgcaggaaaagaagctcaggggtcctactgattctaccttatgatccttcccttgctactggcaagatgtatgcatattccggatcccaggtctgttgtcccctcatgccatgtggaagtttcccaagactatagagaaatgtttagatgtgcagatgccacacactaattcttagagtttctacggccattatgactaaagggatttttgtatactgttt

SEQ ID NO: 348 - DNA, 442 bp, Homo sapiens
  misc_feature 348: n = A,T,C or G
gtttggcttccttgagacagaggatcttgctcgcctcaaagaggagggcagtttgcccccttcctcctgactccaagacaaaagagagaagactgaagagtgggatccagggcctctcagagttcacctgagctttcccaagtctggtttgttctctctaccctgctgctactactgcaagtgactttcacaagatgcttctgagcatagcattgctctgctgtgaccactgcagatgtcaagagaatttctgccttttggaacttggacaatattggccacctacccagagagaggagaaggataatccagacataaagggagcttccacccatcctttggatctcntgataaagagtcatatacttaaagagccatcctcacattcctgcccagactgtgagctgcatgagagaggccatgtctcattttggtccatttt

SEQ ID NO: 349 - DNA, 443 bp, Homo sapiens
gaaaggaaataacccccgaagcctttgcaactaaggacatgtatccttcagagaagtgtttactgggcaacttcttcgtgctgtaattgagtgtggccgattgctcacaaagatgtttgcaaaatccctcctgtcccctaactcacttctccttgcagtgtcactctgccaacttctcctgtcggttggtgaagactgtttctcctcccccttcaatatgggctgggcttgtaacttgcttgaccaatagaatgcagagaaatgaaatgcagccttcaacattcaaggctatgctcaaggagtctaaccctgtggatatgctgttgtcaaatgagggagcttcgattagcctgttgaagacacacagacgacccgacaggcaataccaacattcaagatatgcaagttatgctgtcttaaaccatgctgccaagtgaactttt

SEQ ID NO: 350 - DNA, 165 bp, Homo sapiens
agaactgaggtgtttctctccaggatcttgctacttattgatgacaccgtatcaaggcgccagagtccaaatggtcatcataagaaaaactgcacctaacttccacagcctcctaggaggcccagagacatcactgtacttgcctgccatcctatgtggtgctgg

SEQ ID NO: 351 - DNA, 307 bp, Homo sapiens
gtggggtctttcaagccgagatcgcgccattgcactccagcctgggcaacgagcgaaactccgtctcaaaaacaaagaagctgtcattcggccccagatttgtgcctcgaaaccaccaccgtgaggtcgtttcccacagtctccgcggcttgggggctgacaatcctgcacaggaaaactaggcgacattcccaaatcatccccttgacagccctaattctacttttagaaggttcttggtaccatgaaaacgcaaatgcccggtaaaggcagatttaccatgaagctaataaagctctaacctcag

SEQ ID NO: 352 - DNA, 286 bp, Homo sapiens
gaatccgagtttctgcactactggaaccacgcctcccagagaaatcaaggagacaccagaaaaacctcctcaagggacagggaaaaatcacggacaagctttcttcccttctcacctccccctaaaaaagcccagtgtttttcttcccctccagctatgcagctgcacccagcagagaagtactagattagcatcatctgcatttcattccttttcttttgcaatagctactcgcctataataaacagaccttgtgctcaagggagaatttacttccccgtccagt

SEQ ID NO: 353 - DNA, 417 bp, Homo sapiens
aactctgcagttggtgtcagaagtaatggtgatcttgtggactgtttcgtaactttgaacagacaatgaagaaagacactggtaaaattcaataatactctgcattctgctggactaactgctaccacccaggctggtgatccataccaagagactaattcaactggtcctgtgacccctactcaggaagtgactcagcataactcactgcacaaagacagttttgacacctctatgatttcatccctgacccaagcaatcagcagcacccattccctagcccctgcccaccaaactatcctttaaaaaccctcatctccaaattctcaaggagttggaatttgagaaatatttctcaaatatctcccatcctccttgctcagccactctgcaattattaaactctttctctgctac

SEQ ID NO: 354 - DNA, 162 bp, Homo sapiens
gacattgttaccatttacctccactggatatctattttctttcaaaaagaagctgagaaatcttaatggaaatatcaaatttctacatgatgcttccttgtctcttgagctctaaaaaagacaagaagaaaataaaaagaagtatctattgttatttcatcg

SEQ ID NO: 355 - DNA, 235 bp, Homo sapiens
  misc_feature 5, 7: n = A,T,C or G
acgangntggaaaactgaaagaaaacatatgtcaacgcatgtgtggaatgagactctcaattcactctgcagctactgctccagctaatttagagcagtgatgacaggcttggctggggagacatggccagccctttggaaatgcacattccctaaccatactgtaaaatggtgggttttattaacaatgtatagtgctaacataaaccattaaatgaagcccactcaattctgc

SEQ ID NO: 356 - DNA, 227 bp, Homo sapiens
gcaaagccctcctgttcccagccccaagtcggttaaacccatgttaaatctataggttgaagacctggatcattcgaagcccagagccttgcacagcagcgatctgctccaacagagggtgatgtcatcatccgaggccacacaaataatgcatttctcaccatcaaaaagcctctgaagccatgttctcaaaggcaaaaaataaataaataaataaccaattaact

SEQ ID NO: 357 - DNA, 357 bp, Homo sapiens
  misc_feature 22: n = A,T,C or G
gatgtccggaagaggcaggtancgtggagacggagggtcggcggggcacaagagaacttccagggccacaagcgactctgcatgaagctgtgatggggacaccgtgtcgtcgtccgtttgtcggagctcacagaatgagcaacgctgcgaatggctctcctgtcagccgggactttagttggcaacagtttatcagtcctgcctatcaactatacaaggtcctggccgatgcaagacgctgagcgcagggaaactgggagggggggataagggaacctttgtagtctctgcacagtttttccgaaaatctaaaagtgttctaaaataagtcaattaataaaaccaaacaagagcttg

SEQ ID NO: 358 - DNA, 369 bp, Homo sapiens
gaacctgctggaagctgttctgaaccagagaaggatgaaaatagctgccaaagatgttgccatagcaactgctttccttcctgacctccttggaagttagtagttgactttgcagttgaagtacttttctgaaggcagaagaggctgtcagccattttatactgacctaactttcttctcttgaaggtgaactccctcattttccagagtagtcaaggaatttctgtgcctctacccatggctttggttaccaactcatccctgggggccttggtttctttctgtgaaatggaatattcattccagcactcaccaccttctaggctggagtaaggctccaactttgcaaatgctggtaagtaaactgta

SEQ ID NO: 359 - DNA, 170 bp, Homo sapiens
  misc_feature 2, 26, 27, 68, 84, 119: n = A,T,C or G
gnggggtctttctggcatgcgtctgnnacaccagccactccagaggcagaggatgatgcaggagaatnacttgagcccaaggcngtggaggctgcattgaaccgtgatcatactattgnactccagcctggataactgagcaagaccctgtctcaaaacaaaacaaaaca

SEQ ID NO: 360 - DNA, 430 bp, Homo sapiens
  misc_feature 380: n = A,T,C or G
tgtccttcaaaaggagtgaaaaaatccacagaagtcatctggctggccaaccaaaacagatgctgtgaacaaaaggcctccctactggaatccagaaacatctgtgtttttatggtcaggtctatagatgtggaagccaggtcccacgcgttgggtatggctgtcaccctgaagataccgcagatcgccaacatcacattccccagtccccatctagtggcctccagtggcccatctactgggccagcaggggccaggaaaggagaagagggagaccagtggggctgaaggcactggtgcgtctgtgcaagaggaggaagccctgtgagagggcagcagcctccggactggtacaaagcgattcttctgcctcaaccttncgagtagctgggattacagcaaaaaataaaattatttgcttatcttcaaa

SEQ ID NO: 361 - DNA, 194 bp, Homo sapiens
gaggacccggggaagaaccaagagaagacaagaactgaagttcttccattcccacctctgcatcaccttccctgctttctctttccccagaagagactcagtcaacatcccaaagaccaatgatttcattgttttacaccaaatatccctcctctaaatttttcaagaaattgggaataaacttcttacgcaag

SEQ ID NO: 362 - DNA, 454 bp, Homo sapiens
  misc_feature 356, 383, 410, 418, 420, 431, 437: n = A,T,C or G
atggaaaaagaatcgcaaataagcataatgtgaagagcatgagctttggaataagcaagcctggaattacaattttcttttattagctctgtggctgtaacactcaacttttgcaagcttcagtttcctcgtctgtgaaatggaataatagcacttacctcattggctgttgtatggattaaatgagaccatgactatggatgtatggcatttggtacccaataacccctcaataatcggcagctataattattcataataataatggtggtagcaacaaacccagcccaaacatctgaaggaccgatcactaaaaagaagatgaactcagtcctacgtagtaacaagaatgtganatctatgttggtgccaaaagtctggangagttgccaggaccagaaaaaaagganggggtgangnccgcctggaanaaggangggacagatgtcaaggg

SEQ ID NO: 363 - DNA, 273 bp, Homo sapiens
actccaattagtctccgcaatgcagtcaagcagatctcatgaagatataaatctcacagccttctctaaaacttctcccactgatatctgggatcctgaggcaagagtgacagaggcaactactcagaaatcaggatccatgatcaaaggagcaacagcagtgtcaaccaagaatgtgtttttagcaaatcttcctacacactccccctattctccagccatggcagttattaacctttccagaatacaataaagcctctgtgattcttggct

SEQ ID NO: 364 - DNA, 387 bp, Homo sapiens
  misc_feature 272: n = A,T,C or G
gaaaactgctgcagagtgagagtcttctaaatggattaagaagcctatctcaatccctctggagagtcctcttcaattcacaatgaagatgttgaagagcagggacagacatcaacactcctctccccaccttccccactggcagaggcattcaggtcactactagtgtctctctttctcttttccccttctcttaatctctcactgcccttctctccatgtcatattctctttttctccttccctctcttccttcttacctactaaactcnatatgtaccaaaatcagtcaaagctctactatctagctctctttatctagactaaagggagttgtccacctcttggtctagataacacttgcaaataaagacctgctcgtttccc

SEQ ID NO: 365 - DNA, 101 bp, Homo sapiens
gctgagatctgcaaacctctgggtctcaagagatgaaggctacattagccaactaagacgacaaactcaactcttccttgtcattaaataatttgccagtt

SEQ ID NO: 366 - DNA, 443 bp, Homo sapiens
  misc_feature 132: n = A,T,C or G
aaaacccggagagaggttggaaacaaggtcacgacctaatgctcctcagccgtgcaggccaatgctttgtggcgtcatcagctgcccaccgtgagctggtcaccactttgagtccagttccccctggcaccncttgcctagtggataatatcatacctcactttccagcagagaaaccgagctgcagaagttgaatgaaggtctctagggatgctcttgggtccatcattcattatgtgaaatatgaaaggcctcaaccatatgttcccaagcccctgggttgctgactggcaagaggagagaagccactccaccaagctgaaacagtacctgtccctcacggtggggagctgaggcagccagcaaccagtcaatttttgcaggaccagaagcaccattagaggccttgcttgctgattcatttccatacctcgttgatctcc

SEQ ID NO: 367 - DNA, 213 bp, Homo sapiens
aggagaaagctgaagcacaagatggttaaaaggactgttcaagacagccttgcaattttgaccaaggaagaaagctgaagagtgctagggcaagagaggaactacgtccagaacaattcataattccaaattctcacttccatgatttcaatgctgaatgtgtacttctctagctaaaaatacaattgcttaagtaaaatcatcattatttac

SEQ ID NO: 368 - DNA, 261 bp, Homo sapiens
gctctacttctccaaaagacgttacatattccaaggatcctgcgtctcaacaaaccctttcttctgcaaaagaacagcctgcttttattccaagctctgagattccttataggaagctgtttctctccagttatgccatgttatgccttaacctgggccaacagtgcctacacacggagaatgcaatggttgaggccaattcattaacagggattgtttagccacatccgttgttaattgacaacatgtctatggaattag

SEQ ID NO: 369 - DNA, 455 bp, Homo sapiens
ccatccccgacaaggtaccagacatatgagtgaagaatcatggaccctccagtccaccccatccaccagctgaagaccatgagtaacctgggccacatggagcagaatacccagctatgccctgcccaagtccttggctcgcaaactcattaggacttggattgatggactctctagcctgagactgaggccctccttctaatgaatggggcagaaccaagcaccttcaacctcatatgaagagcagtcaaagaaagtttaaagcaaaatgaccatagggggagggcaggtttgtgtgcagagatggccctgaagaagagtgctgccatggcaacacaaagacagcagacaggctcatgcacttgccaccagtggggttctaataaatgttttggggaggcatggagatggcatgtcttgcctgagtcaacaatcagaaaaaaaaaaagggccgg

SEQ ID NO: 370 - DNA, 192 bp, Homo sapiens
gaacccttgtcatccagaatttcccaaaggatggtttgcagaacaccagtctcaacagaaaaatctgtggaagaagtgccctgtgatctggcctatttggaatactccatccatcttttggaaaattaaaatatttatggtcaagttaaaggcgctgagaagtcctgcagtaaataaacctgtatttacttg

SEQ ID NO: 371 - DNA, 235 bp, Homo sapiens
  misc_feature 167: n = A,T,C or G
gattaatgaaaataaaacgcagaccttataagcagacgctgtgattttgtaataaagaggggcagcttttacaggaaaaagaacccgagggaagctgttggcagtctgtgaaacgatggtcatggtggaattcgtttttctgcacattagatgtttaaaacagctgnaaaaaagaaaaaaaggccagcgaggccaattcagcttggacttaaccaggctgaacttgctcaaaagg

SEQ ID NO: 372 - DNA, 137 bp, Homo sapiens
agtctagaaaatatgaatttacaaccacagagaagtgaagacagtctcccagattctcaccccgtgtaattgaaagtgattgttgaacattgctgatgaagacaaaccgctatgtaataaactgaataataacttag

SEQ ID NO: 373 - DNA, 186 bp, Homo sapiens
atttaaggattcaatatggactgcctcaaatataaagggacacatttgctacatggtccagagacttgtgttcctggcccagaatctccttgtcctatcaattgttggaaagacactgcctgcatttgcccttttgcctctctctgttctgtacttgcactatcaaataaaaacaatttctaatgg

SEQ ID NO: 374 - DNA, 163 bp, Homo sapiens
atttgtaactggggatcccctggaagaatcgtctggaaattacgaccttcatctggcgattgcagctgttaaagtctccaaagaggccattcttacattgtgttgtgaaattattactctatctcaaatctgtgccagaaagaaaataaaatgtgtgtttatg

SEQ ID NO: 375 - DNA, 64 bp, Homo sapiens
gtatcatcgaaacaggaattccctgacttcagtaatgagtatttataaataaatcactataaac

SEQ ID NO: 376 - DNA, 337 bp, Homo sapiens
aaatcacttgcaaggaagattcagttacccactgctacactagaaagttaggcttctcttgcggcattccacagtgaatcccttcatcaacacctggatcttacaaaatgaagtacctcagcaagctatgaagagaaagggtgttctacccccttctactttctgccacctcaccacaataaccaatcctatcatcatcatcacaactggctccttcatacctttaaggtcccttcaaagaggacatccttgaccacttcccctaaaatatatatccccttccatgagtgtgctctctcagcaacctttctctcagcaataaaattaatgtatcatt

SEQ ID NO: 377 - DNA, 62 bp, Homo sapiens
aaatcatgcccaagttcaaacaacgaagacgaaagctaaaagccaaagccgaaagattattc

SEQ ID NO: 378 - DNA, 170 bp, Homo sapiens
attggagaggatgaaggccctgaggtccaagaacatggaaacctgacagtggacgccaacagctgtggagagaagccgggcgacagctgtggagagaagccgggcgatatgctcacgcttccgtgtgcccagcaatcctgctttatctttttaaataaaggtgattcctg

SEQ ID NO: 379 - DNA, 313 bp, Homo sapiens
cacctaaagcagtgactggtgcatgacagctatggaagaaatgcgtaggataaatgcatgaaagacaggaagagaaaaagccaactgggcacagggtcaaaaactatgaatgaagagagcaccacctaaaagactgctttgcagaatcaaatgccacagagaagcaaggtaaaatcaggggtgaaaaaagaaccgcctgtgtccactggtcacttttgtcctcatgtttccatggcataataagaatttaacagatgcatttcgatggatacaaagaagacattctgggttaataaataacttttgtaatatg

SEQ ID NO: 380 - DNA, 223 bp, Homo sapiens
gcagtgttgtaagcacggggacagagacgtacgtgagcagatggaacccccgaagacctgcagctgtcatcctgggactgtgtgcccggcactgtgctaaatgctccctggggcatctcgtgtaacctttgcaggaaccctaaaaacgacgatcagattagcctcctcctcttgaaaatggagacaaaattcaaataacataaacttcaccactttaaccatt

SEQ ID NO: 381 - DNA, 444 bp, Homo sapiens
atatgaggttgttgtatcctaggaaagaatgtcagcctcttgcatcccctacaattggtgagagaagccctgacctcaatagcatgagaagacctggattctgatgcgagctccactagcagcctgctctcctgactccccagtgatcatttctcctgtgtactctggggctgatacctaccctgtcctcctgctttgcccttgaggactttagatgagcaaaatgcaagagacattcctatgaaagtgatagattgtagaggtaatgaagcttctcttgtgaatatgtgattgtctcttctctcttgtgtgatgctgagacgctgaacagagtaactggtacgtagcaataattcctcatatttttgcaattctggggaaggaggaggaagaggatgatgatatgaaaacgggaaaaagagagaggtgatccctatggtgggt

SEQ ID NO: 382 - DNA, 403 bp, Homo sapiens
ggtcttgctgtgtccctaggctggagtgcagtggtgcagtctcaattatgccagatggctctgaggtccaagtaaaagataatatttgcaaccaaatcactggagttgaccatcaaaactcttttccaggtggaaaagcaccctgaatccagcttcctgctatgaatgaatactgagcttgggttggtggaaattgattttcgagataaagaatccagccaggactgtgaagccccagggaatggctgcacttcaagtcagaaggagcctgggtccctgaatcatcatgtggaaggctctccacccagttcaatggtgcaatggaccacaagcaggaacttaatttaaaaatgtgcttatttttggtagattttgtaattaaaaaatgaatcccactctgctg

SEQ ID NO: 383 - DNA, 379 bp, Homo sapiens
gcactacaagcaaatgccaaatacagggaaagtcaactagatggcagcacaagggaaatgatccctcagtcattccgggcttcacaagggaggatcaggtcaacaatttcccagcactctctgaggatacggaagggctcagaactcctcctcctccacctcctagggctccttccttaaattttgtaatctgcatcacatcatattgcagggatgtgctaagaaacatacagacatgaacacccgaacaagaggaagctgaacaaaaataacttccatcgtacctagaaaaaaaaacttctactatattttatataacagcagaagtctattccatcttctcttctgctttaaaaataaaataatcattttccaatcc

SEQ ID NO: 384 - DNA, 448 bp, Homo sapiens
  misc_feature 265, 269, 309, 329, 330, 348, 357, 365, 372, 373, 378, 390,413, 432: n = A,T,C or G
cagaaactgaggttatttggatgaaatgcttatttcttttttaacataagcattgactggaaatattggttattctgtctgatattacatgaaggtcagatgccctccatgcaaccatgaggtcggatggcagtttgatgctgaaccagcaaacaagcctactcagcatgagactatgagtataaaaacctttatgatgacctacctccacttggatcaatgaagagaataagagttggggacataaacacattcaggagagaangaangacccatgttgatagtcacagggaagaaagaacagctcancctaacattacccaagggcnntagaaggcctgtacaaanaaataccancccctgantggaccnnccttntgatcctttggnaccttcccaggctttcccagaanttacaagggaaaaaattanaaattttcccggtttg

SEQ ID NO: 385 - DNA, 278 bp, Homo sapiens
  misc_feature 116: n = A,T,C or G
gcaggaagagtccctcagcagctattccagccccagtgagaaaccagaaaagatgctgagacgttatgagacagtgaagaccgggatctatcattggactaacacagcaatcatcnttaacatgcagagaggagaggaagacttgtttcatctcattcatgttgcagggagacgccaccgatttgagtttcaaattatggcataatagctcatttatgcaaatcataaacaagattatataatgttgttgtgaatgaaatatacacaccaatctaggt

SEQ ID NO: 386 - DNA, 162 bp, Homo sapiens
  misc_feature 61: n = A,T,C or G
tgcaaagtaaatgatggcagtgtcctacgtgacagcagggcaacaagatagaaggaacctntcaccgaatgaccatgcagagcaaagttactcatcaggcaatgactactcataccaggattgctacatgagcagtaaataaacttctttgttatttgagcc

SEQ ID NO: 387 - DNA, 447 bp, Homo sapiens
ggcctcaccaagagtcttggcgtgaaggccgacaatgcatatcctgccaggccaagaaacaggaaaaatataaacaccagtgatagagacaggaggcagccaaggacccctcctgcccccaacacctgacgaaatgccgccttcaagcctaaaacagcatgagggatgaaaaaccagactgccggtccggatgaagcccacccttttccccaaatgattctttctgaataacgcccatctgcacattgggaggagggggtggggccttgggaagtttgcactgtttgcaggggggaggagcctggtctctctcgtttctgtgtggtaaggtgggatttaatccctgagatggagagcctgttagcaggactcttatctcactttgctgatgcgtatttcctttttcatttctgcctaataaattccacttgtcacccttcaaaaaaa

SEQ ID NO: 388 - DNA, 303 bp, Homo sapiens
  misc_feature 173: n = A,T,C or G
gcatagggatttccagctttacaacatgctatgaattatcctcctctgtgttaacacttgtgttaacctcatccgaagtcctgggggatgtcctgttcaacctgccatttcacccatagtagagttggtccacagtgaaaagtggtgaaaagactgaagtctttataccactngcatatattgttcctgatcctgcgtgtacatttcagagaactggtgaataaactctccgctccatgcctttctgctcagagaggttacatcttatattctccaaatttaaattaaaatgtagcttccttc

SEQ ID NO: 389 - DNA, 442 bp, Homo sapiens
  misc_feature 393, 409: n = A,T,C or G
ccgatcgaatgcctgctgcactgctgaagaggaaacagagtcgtggcctccgggagggggctcaaacctgtgactggtgcatgttcgccattagacacactggctggtgaccagcagccccacctacagaattccctggaatgaggaatggcattcctgagaccactcagcagagactacctcaaaaggcgctgctcaatgccaggaaatgcagcgagagaaaatccccttccggtgccacctctgtggccagcacacaggtcccctgctcagcgggtgtgtgtagacgtgccctcaggaagctcagcccaaggccctctggaagtggccacagctggaccacacggaactcatccactgcttctttggagctccaggaaagcgccagaagangggcactgaggcaganggaaagctaagcagcctgtggctcaaaacatac

SEQ ID NO: 390 - DNA, 111 bp, Homo sapiens
gtgaacattcctgaggaactgaaatatgaaatctgtcaagtcacatacagagatcctgtagatcattcaactgcccatcccaaatcatccaataaaatatgatgcttctct

SEQ ID NO: 391 - DNA, 447 bp, Homo sapiens
gcatactaataagcccagggaagaagagtcagacccagtgccagcgcaggggaaacgcatctaatccagaacagcagacacagctcctctcccatggaacacccagagcagacattgccagtcgatcccagcaccctttccccgggagcctgggctcagcctcaagactttgcctccgcttcacaaagctctgcacagccagttctcatcaattggagttggtccaaaatatggaaactctttgctctgcctgacccaaaccattcctctttcccataacaattctgacatttaaaaacagcagaattccccaacactcatccccgggaaaagaaatttggcattgttggtactttcaactcctgaccctggtcaagctgttgagtcaacttgtggttgagtctgagccccatttctgcagacagaaagaccgcatttgcgtttttg

SEQ ID NO: 392 - DNA, 336 bp, Homo sapiens
agttagactggctgagcaacccaagcttttgtgttggatccataacgtccctgagccaacaaactgaagcagctccagcccatgtttctgaagggttaccgctgacaagtggcaagtacatgacacagttagtgcctgtaattaggccaagagggaaatggcatcattgtgattctcgagtaactttactagcctcattagtaacctttagaacatcataattcaggagtcatctgaaatcagagtcttcagatgaaagtgacactaacaaaaagctcaaacaaacaagtagaaaaaagaagaaagagaaaaagaaaaaaagggagcatcagcatc

SEQ ID NO: 393 - DNA, 76 bp, Homo sapiens
taaccagtgaggaactgaggtctcccagcaaccacctgtgtgaagttggaagcggcgctctctctctctctctctc

SEQ ID NO: 394 - DNA, 443 bp, Homo sapiens
gggtcctcactcagaatgccctccctctaacaaggagataattggagacacagccggctctgggcctgctctgagttgaaagaggcaccaaggaaccttcaacttcatcctcaccctcaggaaatgggaattgttcttccccagttctcaaagaggagaagcagcccttcctagctgggacatgatattatgttcatcactaggacctgggccctgtgtccagctctgccattagaccttaacctctgtgctccacatatgtccaacgagcatgagattatccaccccattatgcataggatgtgcagtaggcagaattctaagatcgccccatgacctctgccccctggtgttactgctatgattatgttatgttccattgcaaaagggattttgcttttgcccatgtaattaccgttattaatcagttgaacttaaaattt

SEQ ID NO: 395 - DNA, 439 bp, Homo sapiens
cttttcatttaatcttgtacctaatatgggacgctggcagcggcagagagccagaccgaccttctaaaaccaagactacagaccacacacatagccttgaagatccgtgaacttctttataaagggtgaagtttcatcaaactaaggaatgaagggaaaggaaagaataaagaaagaacaatgctttttgttttccgagtattctttttgttcactacaaggtggcaatcagatatctgtagcaagcttggatcagtgacgtctgagatacctgtttatggattattcatctgttctacataatgacatctccacctccagacaaaaatttcatagtatgattgtagattcactgtgctcttatctgtatgcagaagaatgggaattgggacccttgccacacacttgtgaaaggaaaataaatctttggggtcccaaa

SEQ ID NO: 396 - DNA, 446 bp, Homo sapiens
  misc_feature 15: n = A,T,C or G
gtggcatgtggacangcagttggaaagagaaagtacagaaagaagttaaaagtatgctagaaaaaacagtaagtgaagaaatgacagaggtgccaaagccaggtgaagtgaagaggtatcatgaggcagaagtgtcttcctactctgagcgggatcccaggaccagcagcatcagcattccctgagcctcatcccagaccgacagaatctgcatctgcatgtaaaaaagattcccgggtaatttgcaaggatattgaagtttgagatgctgtggtggtgtggtttaaagcttgaggtctggaattagaaggcccatttcaagtatctgtgcctctcattagctatgtggccttgtacaagttattattatttccacccctaataggtagagatgaatctatgctaaacacttagaaaatgcctggcaaataatactatcattcttt

SEQ ID NO: 397 - DNA, 221 bp, Homo sapiens
aagaggaaactgaggctaagagattgaggcactcatccactggcaagtcccagcccagcaggactgcagaggatcaagacttataagaaaaccttcctaacaccagtgcctgccttgtttttccagcgcaaatcatactcaggaagacaaacatccaacgtcatcctctgcttcttgggcccggaagaatgttataaaaataagtaactcatgaagaaaac

SEQ ID NO: 398 - DNA, 402 bp, Homo sapiens
gcctgcactatgtactgctaagtcaatttgtggatttaagtagcaggtcaattctatcaaatgctgctgggtcactgaataaattgaggacaatggcgacaggaaagctacctctgaccttgacaaagcagtttcaatggagtagggtccatgagcagacgagcagatgaacagatgtacagaagagcagagaggcagagaagcagctcagcagagaaggagagaagagaagagtctgaacgtcgagaggagttcagctggagacagccagagaggaggtcagctgtggaacagccaaactccagaggaagatcatcttcccactccatcccctttccagttccccacccgtcccattaagagccaactccatcatccaataaaatccccatattcactatc

SEQ ID NO: 399 - DNA, 437 bp, Homo sapiens
ctatgaccacgaaggccgcctgaccaacgtgacgcgccccacgggggtggtaaccagtctgcaccgggaaatggagaaatctattaccattgacattgagaactccaaccgtgatgatgacgtcactgtcatcaccaacctctcttcagtagaggcctcctacacagtggtacaagatcaagttcggaacagctaccagctctgtaataatggtaccctgagggtgatgtatgctaatgggatgggtatcagcttccacagcgagccccatgtcctagcgggcaccatcacccccaccattggacgctgcaacatctccctgcctatggagaatggcttaaactccattgagtggcgcctaagaaaggaacagattaaaggcaaagtcaccatctttggcaggaagctccgggtttaagaatgatggtgggccttcc

SEQ ID NO: 400 - DNA, 132 bp, Homo sapiens
acatgatatctggagatgcaagaatgcaacaaccatcttgccaccaaaagaagaaaaagatgagaacaaaagtccaagtgctaaggatgcccttttcacgttctgtgaattaagaagaaaagaaaagaaaag

SEQ ID NO: 401 - DNA, 260 bp, Homo sapiens
gccctgggaagattacgtagccaacactggtgtgaaaatcatgcctatggagggttcttttggaacccagaagaaacagataaaggaggtgtttattcatgaaaccagcacttagaagactgcatcagcagttccagctccatgattacaagctcctcgaagacatggaccagatcacacctctcctgtgtggctaaggccaactgcacatgtagaacggtgttccttctatgcttgggacaaataaatctcacaaaatc

SEQ ID NO: 402 - DNA, 292 bp, Homo sapiens
cacagaaaagttaagactcttcagtgggacctgctctggccagtgaaatggaaaagaaagtgacatgtatcacctctagtggaaactctaagagccagtgcaccatttaccgaattttatttcctgccttggcaattgtggatgaatttccatcagcctaagtacctgagcaagcccttctacagacctctactagacatgtagcataaaggagaagcaaacttttgttatattgagtgagacgtatcatccattctaataaaaaaatcataataaaaccttctaaaagatc

SEQ ID NO: 403 - DNA, 194 bp, Homo sapiens
gacagcacttggtggtgttacattgatagcctgaaatcagccatcgtgagagtatttacactacaaatcaacaaacattatacatcagaggttttattgatttgttgactgtctagaccagggatgagcaaactacaagcaaatctggcttaccacctgtttttgtaaataaagttttattggaacacagccac

SEQ ID NO: 404 - DNA, 294 bp, Homo sapiens
acaagatattgctgagatgttgcccagattggtctcaagctcccaagttcaagcaatcctctgaatcctctggcctcagccttccaagtaactgagattacaggcatgtgtcatggtgcccaatttatcaatgcgatgtgtctacaagtggagtggcacattcaaatatttgttgctgttgtcatttgtccattcatttgttgactcagtagcattaactgagtgtctattccaatgtgcagacactatgccaggtgctcgggtggaaggaggaataaaaataatggtcataat

SEQ ID NO: 405 - DNA, 347 bp, Homo sapiens
gtttctttttattgaagcttgaagctcaagttcatggcttcatcaaaagacgcttcaaatcctgaagttgagatagctctcacctggagcccgtgtgttgttctaccctttggctgggaacacagtcacctgggaatcattccagcaggtggcttcaaaagtccaacctgctaggttgaaatctgacactgacacagactccgggagctgccgcggaaagctcaaccaggaacccggaaatgcacaagcctcttgatgcataaaaacagctgggctcccttggagacagagcgccatgggaaaccgggtctgctgcggaggaagctggagctgccatcaacttttcc

SEQ ID NO: 406 - DNA, 428 bp, Homo sapiens
ccaaaggaagcatatacccctggcaaaactgaccagcacctgaacactgccccaacagagaactcaccagaagacccttgagtcgggaattccttcctgtgggtagaacttggtataaacaagtaagccaagcaaggaacttacaccacagcccagttaacaacaggatgcccatgagaacccctgacccgactcagctccctaaccctgtccacaaatggcccgggctctgtgccaatgactaatctccaaagtattcagtgaagcgtctgctccattcgggattttttcagatgggcattttggtttcatcaagccctgctttctcccgctccgtgactttgcatcagttgtcatgaggatgattaaataatttagcacttaaccccctgctgtactccttggcctggatcatgaccacaccgaaa

SEQ ID NO: 407 - DNA, 299 bp, Homo sapiens
  misc_feature 25, 53: n = A,T,C or G
cctgcattaaacgagactgagggtnagccagctctccagggatctctcagccngggcggacagaaatggatacccaatgttacttgcttggccccctgacctgatgggagtatgacctactgggcagagctcagctcagctaccccaagaagtaaacagcacagagggaaagataaaccttccaggctttccgaaagcaattatcatgtgtggttatcgaaaatttgtattcactatcccgggggaaggaagcagagatacaaataaacccagaattgatatttgcctggggataaatt

SEQ ID NO: 408 - DNA, 418 bp, Homo sapiens
  misc_feature 382, 393, 396, 404: n = A,T,C or G
atgataacaaaggctcaagaagattaaggaatcggcagatgtgggatgtgcaatttccctatggctcggtagatgatcaagttaaacaggcacgctattatgaaaaaccaccaataaaatgggagaaagacataactgctgctgtatgtggagactgcacctcagccttaatttgacttgccgagcaagaacaaatggacagcacaccgggtgcttgtttagttaccgcggcacatgattatgaggtttccagaaggcatcttcttcacatgtgagatcactcagacttcagcacttggcaatcagatacaaacatgtgcaagttgaactagaaattgtttgaaaaagctaatgatcttgctctagatttttttttttaatnaaaaaactttntgngtccaacngaaatggaataaat

SEQ ID NO: 409 - DNA, 435 bp, Homo sapiens
  misc_feature 351, 377, 384, 411, 421: n = A,T,C or G
gtccgccaaccatcccccgatccggccgtgtttaactttctttgccagtcgtgataccccgtcagatttctggcgctgccacgccgcccgcctgggctccttctgggctcttatcaacctctcccagtcagtctggcccgccacagctgttccaggccctcagcccctcactttatctgctcgcacagacctcggcctggcaagcggtgggctcggcgcctgctccacataccccaggaagccagctgggaacacagccgccctgctcccggaccctctgagagttcattaccagccagggtaccccagcccgtcagccaaggtgcgggccgcgctgccgagcccggccgncggagccgcctggatcattaaaactncaccctnttgagagaaaaaagaaaaaaacccccncttttaattntaaaaggctttggg

SEQ ID NO: 410 - DNA, 399 bp, Homo sapiens
agtaatgtgcctagaaggagacagtgcatcgaagcaagtttactctcagcatgtcaagaaaacattaaaatattatttgcctgatgattgcattggacacattttgtgaaatacatgagtccctcctacctgggatgtcaagagactgctcttttgctgggagaatggactgatcttttgcatcagctcaacgctgcttttggggagccattttggatacaatatatgtattgcttcctttaaatgggaaataaccatggtctgtcaacaaataatcttgtttgataaatctgacccagatggtgtgctaggttgcaaaaccgtcttcttctgctttggaaaaactcagctctgtcccttcatcccttcctctgccaccagcctctgtccacccccaag

SEQ ID NO: 411 - DNA, 79 bp, Homo sapiens
  misc_feature 37, 50, 59, 64, 66: n = A,T,C or G
aaaaagtctccctctggaggacaccaaactgtcacgngcccgcttctatnactccctanccagnanggtaaggtcagcc

SEQ ID NO: 412 - DNA, 393 bp, Homo sapiens
gaaggcataaaacggattcacgtataaagttattgcctccctgagttcctggtgctgtgttaagtgctggaagtatgaaggcaaatggaagtgagatttgttcctgtcctgcaagaactgtgagccaggaaagtagcttagaagtgaccaatatgtcaaggtcccatgagaagactgaaaaaaagagaagaaagaggaaagaaaagaatgacaagaaagagaaagaaagaaaccaatatgctctttgttctttgcttttgcttcctcaagcttttctctgtctacaaagccaacctctcctgctcagctcatcagaacattcactccactttctggaatgaggtgttgcctgatcctagaagtcgcaataaagcccactgagatcgtaaaact

SEQ ID NO: 413 - DNA, 325 bp, Homo sapiens
ggtctccctctgttgcccagcctggagtgcagtagcatgattccagctcaccgcaaccttgaccttctggggctcaagtcatcgagattacaggcatgcactaccacatgcctgatgtgagctgaaaaatttctattgcctggtgacatcatagtcattgtaacaggtgttggtgtaaagacagacctacagatgaatgaaacagaacaaaaaatccccaaatagaaccgtaaatgtatgccaattgatttttgacaatggtgtgagggcaattcatggaagatatgtataagaaaataattaaataaaccttgctcaatccatg

SEQ ID NO: 414 - DNA, 209 bp, Homo sapiens
ggacgttctaacataccggaaagtgtggcatcaactaccttgaaattggacaaattcagctttggaggtgctaagctaactaaatccattccaatggaagccagcccacattgcagctgctgaagaagctaccctgactgtacccaaacactcaagcaaacgctttctggctgactaaactgaacagtataagaaaccagggtgagcac

SEQ ID NO: 415 - DNA, 444 bp, Homo sapiens
  misc_feature 378: n = A,T,C or G
tagtgtctccaacaccatcttgaaggtgcagtgacttgcatatagtaggtgcttgatatttaccaagtacccctgtgggtcaggccctactctcaccctaaggatacagcaggaagcaaagcagaggtggagaagatcccactaaacacacaggccgcttggaatgttgggccatctgtccttttgacatgaattttccctgtaatgggggtagagctggtaactgttggatcatttgattattggagacagaagtcctgtcacttgcccctgctgttaggaggtgggcttcctgaatggctttctgtatacatgaagaatttcaagaccttccgttaaggggggcaagagctaaagtttcagcgtttacaaagaagnctcttggctgactttgctataacttacagcacctgacgtttggacaccttttctttttttggtttt

SEQ ID NO: 416 - DNA, 558 bp, Homo sapiens
  misc_feature 425, 454, 467, 474, 481, 487, 499, 524, 529, 530: n = A,T,C or G
acactcaagtttcccacacatgactggatggccctggccacactgggaacggaatgggggcctcccattggaactcagggtggagggggaagctcgaccagctattgtggcccccacttccattgacaaaatgtggtggtgagacttgctcttggatgctgtcaggaagtatcatctgactgcgtttgctaccctgggggagacaaacaaaacttgagtgaaggaaaatgagaactcacctgaaaccaagaagagtctttggaaaaggatttttgtggacctcatcaaataaccaggaaagattaatcacctgagaagagaagagactgggaatcttcaccctgcccagacagacttttcatctattctcctgagagcagctacaagagattacctgtgggactcaatttgcataataagatganctttgtttctgggcaagttccacccccanctttccataatgnctggctnccacctnccaggngcattatttttncctaatgacttactgctcctaaaanaaagnntacctttccatttcttcttcctatggaa

SEQ ID NO: 417 - DNA, 232 bp, Homo sapiens
gggaatgaagaaaagaagaagacaaaaatgaagacaaagaaggagaaggaggagaaagaggaacggagacggagagaaagagagactgatctggactcatatcgcctggatcttgaaccctgactttttgctgttattgttgttctatatgacattgatcatattagtaaatttcctgtgcttccatttcctcatctgtaatgtgagaataaaaatagtaatgctgcttttg

SEQ ID NO: 418 - DNA, 404 bp, Homo sapiens
caaattgcagagaatccatacatgtaaggaccgtgcactaactgattgtgccactggagctccatggaacccatacataaagcacacctcttctcttctccttggcatccaacctgctggctctacaactactttcaacaatgagtcaaggctgtacctggcaagatggaaattcaaaatcaacaacgaaagctatttattttggttttgatcctagccctgggccttttactaagtattcagaactgatttaatgaatgaaaaaatgaatgaatggtatacatttccattgtctattctgcttcttttccctagggaactgtgttaggccatgatttccttgctggttttttcatatgggtggtttattggcacacgcttaaattaaatcactagttccattc

SEQ ID NO: 419 - DNA, 443 bp, Homo sapiens
  misc_feature 370, 384, 429: n = A,T,C or G
aaagttgaaagtagctgatatgggaccacagaatattggccaatcagcattgtcttaattgaggctctacttcaaggaaacctgatcccagaaaatgcctaaaaccaaaacagagagtatgtggcactttttaattttttcctggaatcagtggtcataacccagtttactgtttgtgtgattctaaaattctggattgtggattgttccttccaaaatctgctacttgtttgctgcattcaattggaacttaaaatagattttaaatccatcctggtaatttcagaatcattcatttcctgtccatctcgtcacttattggccaagtttccagtcttaacactgctctactggagtaaaagggaacctnatgggtttggccanagggggaatttagggccttacagcttatgaacctatagggggggnggatttataaggca

SEQ ID NO: 420 - DNA, 971 bp, Homo sapiens
  misc_feature 14, 26, 39, 44, 51, 54, 58, 60, 64, 69, 182, 197, 303, 311,319, 322, 341, 374, 380, 382, 391, 399, 418, 422, 423, 424,429, 431, 436, 450, 457, 459, 465, 475, 485, 489, 494, 498,500, 505, 510, 511, 515, 518, 531, 539, 552, 582, 586: n = A,T,C or G
  misc_feature 606, 611, 651, 659, 663, 681, 703, 708, 757, 761, 762, 774,778, 799, 804, 816, 877, 898, 914, 944, 952, 954: n = A,T,C or G
ctggggagcctacnctgcattaagtncagaaacttgagnacgcncactgcnatncttngnatgnacganccttagggaagcggcggcgaggacactgacactatgcgagaaggcgtacatactgctcaccgtagatgcacttctcttggtatcttttgttggcgtgctcgtttgggacgcanacatggaaccacaanaccttagctgtatccccttctatggtttctccttcgaagtaccttgcacctctaggacacacacatggggacaacgatttcctacaaacaccacattatcttttanatatttcnaggtgtcnaanaggaaaatgggatacgaanaggccccttgcatgggacgacacccgaaaaggncgcaanangacccaaantacggccnatttggccccccttggttngaannnttttngncaacncccttaattaacgnacccccncnaggaancgggggcccnttggaaaaanattntaccnttanantacgnaaaanncccnccnaaacacaccttanaggaaagncatagtaattggncctcccctttgactcccccccatctccctnttantacttttgggattgggaacntattnttcccccatcgccaatcgaaaagaggcggaaaagggttgncttattanactngggggggcccgggggtcncctttttgggccccgttttaanaaagnggggaatggggaaccggtttttaaccccctttgggttggggaaaagggnaaanngggaaatttttncccnttggggccctttccaattttnccttnggggaattttcnggaaaaaaaaacccaacccccgggccccaacctttggaaaagcccaaccccctttttgggngggaaaccccccccccaaacntttccctttgggggcnccggcccccaaggaaagaaaaacccaaaancccccccncncccctttttttgggacc

SEQ ID NO: 421 - DNA, 307 bp, Homo sapiens
  misc_feature 94, 154: n = A,T,C or G
gaaaatgcgtcacccatcaatccaagccctccaagaatgtcaaagctcctccttgaatcatcttgtcctgacaccacctggctcccagggcctntgggcagctgtggctgtgcagcccctgcttttcacctgtctcctgtcctggagtgctcgntgcatcttcagtgtgttagttgcaccactcctttaagagaggctcatgccttaccttatcccctcaatgactgtcttatttttgtatgcccctaagagcagagcatggggctagagtggcaggtagtgtttcaataaacacttgttgacttac

SEQ ID NO: 422 - DNA, 275 bp, Homo sapiens
tcctgaattttctaggatggaaaaagcaagaacttataatagccgctctgtcctgaacgagactggagagtgtgagaaggcagctcgggtgccagcactccaggtgccagcagacggggctccactgaagacacgatgctgcaaactgaaaacaaaacaacaacagcagtggtctgagaagagcactgtcctcatcatttgtattataagagtacagggttttcccccatgagctttttagtgaccataaaagaccgtttaatactgcacagttt

SEQ ID NO: 423 - DNA, 440 bp, Homo sapiens
  misc_feature 345, 351, 355, 362, 375, 379, 406: n = A,T,C or G
gtgaaatggttgtccataaaaaagtggtgagttcagccgaagaaattgctcgtgtttttcctcaagacagctatgaagcaaaagtgcttcatgcacagcttccattttgtcacaaaaagttgtgtatgcaagagttgagactgaataaaattaattcatacagctttgtcagggacattcttaagtgaaactagcatctgtattttttaaagcaacaagtacatggtgacactgaagaatccaacgatggccacggcagcgtgccgccacttccctccacccctgccaaagctccagcaggttcccctctgctgcttctgcaccctcagtgcacgcatcacttangagccnaccncactttntaagctttttgcncatntaacctcatacaccagcctccacaagnggccttgtttccatggagacagttgcccagctga

SEQ ID NO: 424 - DNA, 229 bp, Homo sapiens
cagggagataccagggctcgtcatgggcagcaatgactacgatggacaagaagatagaggccctaatcctaattttctgagcaccatggaagccccctggattctagggagaccttgaggagaaagaagactcctgtaaatgcctgacattgaaattcctgcaagtctaggagcatgtgaactcaaaatggaaattaatttgatgtaataaaaataaagaagaagaatt

SEQ ID NO: 425 - DNA, 100 bp, Homo sapiens
gagacaaaaccagactgacaagctgaagactcaaacattaatcaaactgcgctccggaacaacctttccctcgcattaataaatacatttgcggcccctc

SEQ ID NO: 426 - DNA, 393 bp, Homo sapiens
actgattcctgcatagccactgaccacagcttctggaacaacaaaagcattgaatcattaatcctgaatgtggccaatgagcaagagatgaggaaatctacccagttcatgaccacaaagcaactcaccagcagctggatggcctgggtagcttatttctctggagagactcttagacagtgactcctgatacagagatgctgagactgcattttgtgcctggaggagagaattaccacgtgtgatttgagagcatcagtgttcctccagaagagacatttctaaatgctgctagtgcgaaaaatgagcttatgttcacgtagcccctgggggaagaaaaacagtaatatttaacagtacattttaagaaccaataaaattatttttaaaatc

SEQ ID NO: 427 - DNA, 461 bp, Homo sapiens
  misc_feature 352, 366, 372, 398: n = A,T,C or G
ggagatgctgtcagaagccccactacggaaacatcccaaggcctactattacctaaggtgacaccactcagctgtgcaggctttctccctgacacaggaaaccattcgcagacattacctcatcgctctaatctcctatcaaacctgtgagacaggtaacagaaggtatcctcaatttacctgtggggaaattgctgcccaagcatcagagcttcccactctgcaaacactgcaagtgtccctgacaccagcacagactaagaagtgggcatctctggcttattctgggaccaagtgctaaactgcaaatggacctcctctctatcccaattcatcaggggagaaaaatctnggttaaaaaggggngccttnttttaagcagctgtctcatttaaggncatccgacttgggcagcaattttagtactttacaagccaagtatgtttgcagaaactctagca

SEQ ID NO: 428 - DNA, 383 bp, Homo sapiens
aatccatcatgatcctatgtgggttctgcctaaggaagactttcaaggcaggaggcccttgaggaagaacagaatcatcatgtcatcatccagggtcctctatctctggcaaagactggcctgatgaatgggatcagagctggaggcctgggtatcttttgactgcaagagttaggggtggcggggtcgatacagtcctgcggcagccaagacatccccaacctgtccctgaataacagacaagtctacatttcctgaaattctgtatcactgtattggcaataaacacctagagaagtaagaaaggaggagctcctacaaaaaaaaaaataaaaaaaggccagcgaggccaattcagcttggacttaaccaggctgaacttg

SEQ ID NO: 429 - DNA, 573 bp, Homo sapiens
  misc_feature 460, 522, 528: n = A,T,C or G
ctcctgctggtcttgaacacctggcctcaagcgatcctcccacatcggctttccaaagtgctgagattacaggttgtgaagattacagaaatctgggatggcttatgggacgcttctcagccctaagtacgaaaacagcagtgaaaatggcaaccaaaacatcacgcaggactgggggttttggggaaacagctcactttagagcagtgcagtgtagagctttccgtcttctaccagggtccacctttaacactgtttatctgaaaattttccccctggcttactcgcttgcagctgcccactttgcagaaggatggcgctccgatctctacgctccctgttccttcagggactccatagtattttttttcacgcgtcgtcgctactacagcagacgcctgcgttctcattatttgctgtacagatctccggtgccttgactgtaaacaaaacactttanatcattgtgaggcgatgtaagcacagcctttctgctggcagccagacttcttaagggggggngactgngacttgcttacttttcgagatcacaaccaccaagcgacaaaatgg

SEQ ID NO: 430 - DNA, 372 bp, Homo sapiens
  misc_feature 69, 130, 144, 189, 243, 249, 267, 307, 312, 315, 321, 325,330, 331, 336, 346, 348, 350, 358: n = A,T,C or G
tgttctagcccagtctacagggaatgcacagtgagggtttttgtgtcctctgcttcaccttttgatgtnagagggccaaaaactccaccctcaggtcgttgctaacaccaccatttttggaacatgagtnctgtggagatgtgnagaagctccattgtgcttatgcatgtttctcctttcataaatatncatgactcctcccatatcttattcgaatatagtatagttcatgccaacctgctnaagcangaatatcctgatcccttngctcctcccttgaaatgcctagtttgctcggcttcaagantaganaangctacngctnggcgnngcatngtcattaatncncnacccctgnaaggggggcaaacc

SEQ ID NO: 431 - DNA, 426 bp, Homo sapiens
atgggaaaactggagcccaaaggatggaaatactgaacccatgggctctgtcactagactgcatcccagggcctcaacgtaatatattcttaatcatactggggtaacctattagaaagaaccctgtcctggaatcctggaaaagaggccctgctaggagctgaccttggacaaatcactcccttctctgaacctcactgttcagggggctgagaacagagggtccctaaggaagagtgttgtatgagaacagtctccgctcttgacccaagcaaacctggcttcaaatctcaactcctgtggctgactagctgtatgaccttgacctttctcagtttcctcatctataaagcaggattaataaaaggtacctatctaatatgactgttctgagaataaaatgaaataaactacataggtgatttg

SEQ ID NO: 432 - DNA, 349 bp, Homo sapiens
  misc_feature 45, 325: n = A,T,C or G
ctgcttcctctggtcattgatgtgtcagctcccgctgtgcatcanccctgctgctccccggaagccccgccttgcaaatcacaaaatgtacccagcactccctcacccagcctggattggcaatggccccacaggacacatgggaatgatgatctttaagtctcagatgcctcatgaataaagtggatgtgatggtgccaaatctgactgaaaagtggggaatcagctgacctttcccagggattaaagcatcacctgctgtgcaggggttttgtgatacatgaaggcggtagtgcatgtacggtaccaggagtaacattatgtnattttaaataacaagataagtgct

SEQ ID NO: 433 - DNA, 370 bp, Homo sapiens
atgtttccaaaaataattcatggaccttattaaaattgaaaacgttgctctttggaaaacattgttaagaaaattaagaggcaagcctcagattgagaaaaacatttgcaatgcactcatttgacaagttaattggataccaataagcaaggatttactatgtgttggaaaggaaaacattctgcgccatacttctactaaccaactggaaaaggcatacaattgaattgcgggagaggaaatatgatgaccaaacttggcaagggaaaaaagttagccctcttggtcaacctgggcaaatggagaacatgcaagagacttacgaggatcaaattctcaaatctttcattgaaataaatcaaatgagaac

SEQ ID NO: 434 - DNA, 138 bp, Homo sapiens
ggcagagctcctggaaaccagcatgaaatactggagtcgttaatttcctcatatgaaccagaaacaattttactgctaggaaatatgactgtattatacacaggcaatataaaatcacaaccacaagcacatatgggc

SEQ ID NO: 435 - DNA, 394 bp, Homo sapiens
ttttgaagactgggaagtccaagatcaaggtgctggcagattcagtgtctgattctcctggtctcatctgtccttgccgccaagatggattatctgcaggaacttggaccaacttcacggaaccttccttatgttctgttcatactgcccagacctgccctggcttccctgttgctcctgaggcagaagaggcctttggacttactcggccccacatctgtacagtccagagatgctgggggaattaacaccacaaaaggttgactttagatcaatgtgagacaagtatttcaactatgattgtgtatttgtcagtgcctctttgtaattctgtgagttttttccttcatttatttgataacatactgtataataatgcacattttaaattctc

SEQ ID NO: 436 - DNA, 463 bp, Homo sapiens
gaacatgtctggcctgatttgaagctgctacatctgctttgaaagaagccacataacctttgctgctacttcatttcaaattttcctttgaattttctatttcctgagctgggagaaatgagaggatgcaccctctccctttctaacaggcccttctcacttgctctgatgagtctggctctcaagtgagctgccctgatggagaggcccgcatgtccagaatgaagcataccttctgccaacagccatcaaggaactgaatccttcctacaaccacgtgggcaacattcgaaggaaatccccccctagccaagctttgagatgactacagccccagtgtacacctccattgcagttttataaaagacctgagacagaggacccagctaagccatgggctagccaggatttcctgacctataataactgtgaaatagaataataaatgttgttgttgtaagtc

SEQ ID NO: 437 - DNA, 450 bp, Homo sapiens
gcagcacatatttcccatagaaatgtggaatgtaagaaaggcacataaagcaatccaagttgcctgcagatatccacagcctacttcagtctcagtaatgctcttttaacctggctatatggagagttgacagaaaatacaggatcatcaatcaatgatacagtaaatacagaattcctcacagatgatgaatgttgtccttcagcttctgtggtcacttccacctttaactaaagttggagttggaagaaaggcaatgtgactccaaacttcacagtacctccatcttagacaaacacgactctctccttcacctgcgtgccagctgagggagttctgttccattgctgtctccggggactctgtcagtatatttgatgtaatacttgtttctgtccataaaacatgtgatgatgagaagatcgcagtgcagatccaaaatcatatgct

SEQ ID NO: 438 - DNA, 415 bp, Homo sapiens
aaatctatgcgaaaacaatacacagttctggccaaaagaagttaaaacaaatgtgaaaaataagcgacatccagaaacttcagcagctcccttctgtcctatgcctcaaggtaccagagagggaaaaaggcccccaggagaggctgtgaggaaacctgaactgcaaacccaccacgatgtcttcctgggaaaggcaagttggtaaagaaagatgtgaactctatttcagggtagtatgtttttttcatttgcttccaagactttgatggaatgacttgagaggaaaagttcacaattactagaaagaacctaaaaggacatgagagatgaaaccgttgcagtatttttgaaataaatgttttcctgcaagagcagagtcaaaaaaaaaaagggccgggggggccatttcagttgg

SEQ ID NO: 439 - DNA, 471 bp, Homo sapiens
  misc_feature 438: n = A,T,C or G
ggcctctgaatttttgcatggctcatatcatcctagggaaaaacaagatatttcctagcttcccttgatgctggatatgtatgggcaactgagtactgaccaacagaatgtgaaggaaagtgacaagcacgcctcccaggactcatcttaaaagagagaggacaaacgcctatttcctgctcccctactcaatccctctgcccggaacaagaagatactgagctttcttggaccctgtggatgagaaatgaacaaaaatacatactaatggagtttaaaatcacaggttccatcttctaatgagcctatgtttatttgcctaagtagcataacagtaattgttccagaatgcaaaaatgtacgagatgtactctggaaatggaaaaatacttttcttcaattcaatgaacagattctgaattttaaacaacccaatanttttttaaaagtaacacacctagcaaagaataa

SEQ ID NO: 440 - DNA, 647 bp, Homo sapiens
  misc_feature 407, 469, 520, 571: n = A,T,C or G
caccagtggctctgacagttctctctcagatggtcttcctgttcacctagcaaacatagcagatgagaataagaagccaggctttacagtatcatgctctccaaagagaaccataaactccagccaagagccagctccaggtatgaagccaaactggcctaggagcagatatcctgccacaaagagaggctgtgctgccatggcggcatacccatccttgcacatatacacatacccgtaggtgagcctgggctgtgccacacaagcacttcatcgggggttttgagattagacacattttataatgggggagatgtatgactgggaactgcatttacttgtggtatactgtgttgtgcactcatgcactgaccttacactttgtacttacactgtgggcatgtggncaagatgcatacctcatgaattcaactattttttcataaaatgaaattttattatgatgtgnaaaaatgctttatcacaaactgaagtgtggtctcatgggccactttatggnagcacagatatacctcattttaaccaatagatattctctctaaaattatgngcaaatcaattttttaaaaatcaaaatctatgttaaacacattttggcaggggggctataataaaaaaaaagtggt

SEQ ID NO: 441 - DNA, 248 bp, Homo sapiens
aaaatctccatggcagcaagctcagctgattggatgggagaggaaatttgaggctgggagacctcctagaccacagctgtaatcttccaagaggaaaggtacttacagaattgccaaactactgtgaagacaagactaaacagtaacaaacatctacatttgtattattactgtaatagctgagttgcttgctggttgaaaagtaagggacaacaatagtttgttccaataaagatgatctaactgcc

SEQ ID NO: 442 - DNA, 192 bp, Homo sapiens
gttgactgctcatccattagcagcagatgtctctcgagtagctgaaccacaccaagctggacctgggacttgaggagcccccttcaacctctgccaggacgcacgctggattagcatctgctagggctgccgtaagaaagtaccaaaaaataagtggcttaaacaataaaatattgtctcacagttaaaaac

SEQ ID NO: 443 - DNA, 369 bp, Homo sapiens
tgcctaagaccagacctcgagaagcagggctaatgaatgaacgggttccccaaccttgggtgaagtgatcagaggagtagcagaacagagcaaggaagccagtgtgacagagaaatgaagagatcaatgccacaaaattaaagagaacacgggggtcgctcattccaaatcccccaccaggaagcccctatcaggaggggaggaggagctcctaggaactgaacttggacgcaggccacttcagctagagaacatttctgaggaacaccagacctcgtctccttccgggagcgggatccaacacctggccagacatatcggtgctgaacaaaagtgcactgggggatgattttaaatttcttctttatt

SEQ ID NO: 444 - DNA, 442 bp, Homo sapiens
  misc_feature 335, 347: n = A,T,C or G
atgaggaaactgagacttcaagggtccaaatatcttagtgttcttgagccaaaggtgctgagtgaaggagacatggtccctgcccttgaggagctggcagtctttctggggggacagatggtgagcaggagcagtgcctgccactatgcatggttaactgagctggaggaccctgtgcttcccgcacctcacaggcggagcagcctctcaggaaccccttccgaggcttccacctgtgggcatgctgctttctcatcactgctgctgctgacctttctccccagcaactaccaaaagcccttttatccacagtctaaacaacccagaaaaataanggacccccccanaaggaggatgaagagcagtctgtactcaattttatgatcagtaaataataagaagacaagctcctgctgggcacttagttcaacagcagctcctc

SEQ ID NO: 445 - DNA, 658 bp, Homo sapiens
  misc_feature 15, 19, 21, 24, 35, 37, 44, 47, 55, 57, 80, 97, 98, 120,122, 153, 154, 163, 172, 183, 188, 199, 201, 205, 216, 223,229, 237, 261, 294, 308, 312, 354, 390, 517, 589, 593, 599,645: n = A,T,C or G
gcccccggggggggncggnanttntggccttaaangnggggggngcncccccttncncccttgggaaagggggggaaacnccccccctttggggggnnagaaaaaaggggggggggggcntngggaaaggcccctttcccttttttttttttnnttaggaaanttttaaatnggggggaaaanggccnggaaaaaaaangnaccnttcccccaaanccccaangaaaangaaaaaantttttgggaaaaaaaatgggaaangccccttaaggggaggaaaaattttaagaaaangaaccaacccgaanttantttttgcattggaagggacaccggggaagaagacccaagccntggccttaaaaaaagaacctggtggctttttggcantttgccaggcaaaaaccaagccccattggcctggatggaaatttttggacctgggcccttcaagaaactttcaagccaccgccaccaaggggaacttcttttttcaccaagtgggggcacctttggnccaaattaaaaaataagccttggcttgggttattggcattcttcttggaccttttttctttttacaccttcnttcntggggnggggggaaagggtaaatttcaccccctttttaagccaaaccttttncccatttcaaacc

SEQ ID NO: 446 - DNA, 454 bp, Homo sapiens
gtgacgtacccacaagaaaagagctcttatgctctcctctcttcgggattgctgatatggtcattgatattgtggattttacaaattgaagatttgtggaaactctgcattgactctaggttccacctcatcattttacagaagagacagacatgcaattaagatgacctgcctggagcccacaatattagatcatttcctcatatagtatgaatttgacaaagttcacagaaaatggaacatactcacagggtgccatcaaaacaaaaaggctggctcagaatcaggtcaggagatctccttgtgagcccatgccaccagagtcttgggtccgacacagagctgtatggagtcttgcagaagtggctgctcttggcatgcacaaagacccaagagctttgcatactctgaccccggagatccccaatgaatgtgtctgcactcaagcaagaca

SEQ ID NO: 447 - DNA, 444 bp, Homo sapiens
  misc_feature 391: n = A,T,C or G
aagaatctaccataaaaccaacagactcctcctgatctctacctgtgctgtctgcctctctagttccggacactgagagctggtgccctgtggccacctcaagctggaaccctgcaagatcaccaagaagactgcatgcctcgctctagccttcctaagggaaagtagactcctgtttttgaaagaaattacctgatttcaagagaaacataaaggactttttttcccttaacattccactcgtaaaaatgaagtttggaagaacttctgcaaactctgagtgttttggtcaattgaccttttactgtactaagcaaatctgaagccacaaatacattggggaggaaggtatacccttcacaaaagatccgtcacttagccagatctctgntgcatgcttctttaaataaaagccatttctgggatattttatttatttatttt

SEQ ID NO: 448 - DNA, 272 bp, Homo sapiens
tcaggggtggccatgtgaccaggtgctggcacacaggacaggagagtatacaatgtgatgaccccacaagccaccaaacaagccctgaaccagccaccaggaggactgaaaaagctgaagtcactataatctgggatctcctgtttcagcagcttagtctgtatcctcatcaatacagtgtatctaagaaacttaaaaacctgtgctttactctccataggctaagaatcatccagatagtttgtttactttttttttttagcacattacat

SEQ ID NO: 449 - DNA, 288 bp, Homo sapiens
ctccactttccagcctcccttgaccttcagttggagccatttgactggagtatgaccaatggagtatatatagaggtgctgctgactggacacatgaccagatgcaccatctcttttccccttctgtggcaaccacagaggccgcacattacagagcataacatgaaggaagcacagaagcctgagtcgctgcttgaaggagaaactcccagggggccaaataaccagaaaattctaccttggattttgcttaaataagaaataaatctttattgtgttaatccactg

SEQ ID NO: 450 - DNA, 481 bp, Homo sapiens
  misc_feature 15, 69, 141, 147, 193, 216, 225, 237, 240, 252, 254, 287,296, 309, 322, 349, 353, 355, 361, 364, 411, 412, 418, 432,434, 436, 441, 445, 455, 457, 465, 468: n = A,T,C or G
gagtctctgcattangttggacaagctcttctggaattatcttctaagtcaactgtgggttgggtaggnggctctgctgatttttcgctggacttccacatttgggacgaagttggctgtcatcaactctagaaagggtgnggccgntttacattggctggtttcccacattctcaagcaatagagatgcggnttccccatgttggcccggctggnctttgaaancctgcctcaggnganttcacctacctnanctttcccgacgtactggggtttacaggcatganccccccgtncccgcccaaggangggctcttgaganaatttcattttcttggccctgctgaangaangnctacgnttnatttaaagggcctgcttgtgggaaaaccaccccccaaaagttgctgnnaacaanaaaaaacctttttngnangtcancaanaaaaactttncnccttttgnatngggggctttttgg

SEQ ID NO: 451 - DNA, 397 bp, Homo sapiens
  misc_feature 234: n = A,T,C or G
cagggaagaaccagttgggggctggggaaaccagtgttttctggagaaagagaaacagctgcttaagcacgagtgtctgaaggaagtcctgttccctactgccaacccacgaggcatgaccacagtccagtcgcaggagctgctataacaagatgacaaggaggcaagactgattcactactgattaatgcctgttgatcttcaacaatgggccattccaacaaatgcaagaanggaaaaatcactagccaataacatggggatcctatcctataaacagaaaggaatcccatggaaagaattctaattttatctatttaagcaactattggttactcatgcaggttcagaaacagaggggactatgagtcaataaatgatgtaaagggttatcacc

SEQ ID NO: 452 - DNA, 432 bp, Homo sapiens
  misc_feature 33, 38, 50, 61: n = A,T,C or G
gacacagtgagctcaagaaaccaccaaacacanagcanaaacaaggattngaggcacagtnccacactttctagctatgagagcttggccaagctacttaattctccagccttatattttctcggctaaaaatatatggggcaagtcttgtgaagatgcaatgagataatggatgggaaagccctttgtgaagtgtaaagcaacacacaaatgcagaaataacaactaacagaaggctcccaactggaggatcatgtggaaaaatggaagaactgagactatcttctggccatgaacagaaggagaaaaggatgctgaggacacacttcaaaatctgcatatcctctggttcctctgcttctctaaaaattgcaggaataggtgaaattgagcctgtctgttttctgtaattagtacttcatttttgttttg

SEQ ID NO: 453 - DNA, 416 bp, Homo sapiens
  misc_feature 351, 354, 355, 364, 368, 369, 380, 386, 396: n = A,T,C or G
agatatgaagtgagcctggctcctcactaaaccacctccgggcacatgacgcatcccaggacaccccatgaagaggggccagggcagagctggtgggggactttgattttttaatcttccagcactgacaagccatcaagtgcccaggataacagcacctaaacccaaggccagaagatgccatttgcctgatcaactaaaagtagatggaaagcccagacttagcctgactccattcattggctactcatggctttccttccaagactgacaaattgcggaggttcaacttatatgatttcctaatacaattaaaatcactcgagggagagtcctcaaaaaaaaaaaggnccnnggggcccanttannttgggattaancagggngaaattgttnaaaaggggggggccccccca

SEQ ID NO: 454 - DNA, 148 bp, Homo sapiens
gcacaggtggcatgctctggcggcaaggtgctctacaaggcctggcaataaggaagggtccagttactcgcatccagtggtctagagcatgtttgattaggcaacttttagcagtcgtcctcagctgtgcatattaaaatggctcctt

SEQ ID NO: 455 - DNA, 457 bp, Homo sapiens
  misc_feature 380: n = A,T,C or G
tctagtcattgcctcaacaccagtcattcctactcccacccagacaacatcatctccactcccaagcccgaaatgctccctgccatgccttcgaggctgaggtctgggaagaagactctaagaagagagaaaagggcaccagtatggagaccctagaatataaaaagcagacttagcctgtctaacctgttccttgacttggccatgatcccaggaatggaggaaggatcttccttttcttcctcctcctggagaggcatcagagcatgggccctggctctgttactccctggctggggaagttacttacctactccgtgtctcaagttttacttatctctaaaaggggtagagtaacagcactcactggagtggagtgngggtatgcctcccagcctctccttcagaactaggttacttattccctcactgcaaggagtggtagctgcggactgct

SEQ ID NO: 456 - DNA, 84 bp, Homo sapiens
cactttgggaggccaaagcaagaggattgcttgagcccaggagtttgagaccagactggacaacatagtaaacctcatccctac

SEQ ID NO: 457 - DNA, 462 bp, Homo sapiens
  misc_feature 212: n = A,T,C or G
ggaataagacatggacacctttgagaggccatttttctgctcaccacaaggccccaaggaaatggaagaggatgctaatggagggacccactggcacccactgagttggtatgaagagtattttaaactgaaacatttaagacacagcagatacagaaagaagcctttctggagcttcccttatttgactaaagccagagctttcagagagngaagctgccataaattccctcttggggagcttcactgccagtaaggagactttactgccaggaaggagaccacttgcacctgaatgacgaattgcataaccgaacataatcacaaattgtcgtaccatcatttgtttccctaaaagcccatttgtctttccacaaaaggatatttgcttccccatagaaccctttctctcctcctcccttttcccatattattggcatataaattcttcatccctaactg

SEQ ID NO: 458 - DNA, 439 bp, Homo sapiens
  misc_feature 6, 354, 367: n = A,T,C or G
aacagngattcttcagtggtggtctgaagaccacgggtgttccttgaggagccaatgagggaactgaaatctgtgagctttaaaccgcttgcttgaagacacggctgacatttgtggctgaatcctaatgtagttaattttcctttcaatgggtcaacttgcaactgttaggagtcttcgaaaccttttgtgtgaatccaggagggaaaattgtctggcaaagtctgataagcatcgtgtcaagagcacatttgtactctggatgggaggtgaagggaagagcagcatcatctgtgcagcctggtgaaacggtgtttacgacaggctacaccgggcactactggggtatgctgnctccttggattgngtcatatttttaacccagtgggaaattcataggatcctcttgactctgtaaaaactgtgggacaattcagtc

SEQ ID NO: 459 - DNA, 660 bp, Homo sapiens
  misc_feature 503, 580, 606, 634: n = A,T,C or G
agacctgggcctgcaagaggaagagaatcgcctgaggacacaggagcggggacgggagccaggctttgagtcagtcctccctctcctgggcaagccatggatcatcctgcccagcacttctcgtccttgacggctgagttctgaagggaggaaggcaagacccaaagagacagatggacactcccgggatgacacagttcacagcaaggccaagatgcaaattaatctcctaactctcattacaacagcttctacttttgcctcttctgggttctttcattcactcaacagacatttgcagagttagctcatagtctctcttaagttttagatatttgaagataagcgttaaaagtccctatgattggggaacccacagcttatgggagaggcaagtattagaggtgatttactacaactcgagggatttactgcaactcgagggatttactacgcaaagtgctgggcattccaaggaggcatggaagctctctgaacaccanggcagtaactgctctgcccaagagaatggggtccactcttgcaccttgaaggaccagggatgaagaaagtggttcanatgaatttctgaattagtctgactangctcttgaacctggcgcacaataaatgnagtaaatattgatgccataaataaag

SEQ ID NO: 460 - DNA, 233 bp, Homo sapiens
  misc_feature 187, 197, 206: n = A,T,C or G
gtggaggactttctatcatctctaccaattgatcaattcagaccaagtaagcattgcttcaaaggagagttgggttgggggtgcatcactccttagctggagatacagagaaatctatacctacaagatcctcaaggtgtccttgttgaaaacttcatccaaggaactcaagtactgctggatttgngtgactcatnttacgaacnaatacaaaggcctattaactatttaaa

SEQ ID NO: 461 - DNA, 628 bp, Homo sapiens
  misc_feature 326, 477, 502, 580: n = A,T,C or G
ggaaaccaggaggaattccagaatcaaagagaaccgcattcctctctaccacaaagtactcacacttggcaaatggcaaagatttgggtcatcattttttaaacgacagccaagcattaaagagcccaggcagagagcaagtaaaagagtctccgtggttcctcccagcgctagtctgtggcctcaacaacatagcacgttgcaggaaaaattccaaatttctgggtcccaaggggaggcattactcagcagtctcagcggtgacggcgtcagcaggacaagagccatttgctccgggaggactttgatgtttctttaaatggttnctgcatctagtccaatagaatggatacggaattatctttattacaaccacaaggatgtgcaaatttatttacagtataaatggttctttccacaagtcctagctgtcaacaactctttattttcctggagtgacttacaagccaagaatgntttgtttcttaagcttcctacctanagaggtaaaataacaatcttggtaatgagaagacaaagaagctaactgttctgctttgcaagcgttcctacagaccgnaccttttaattgcctagtgctggcaacttaacatactgtaatgagacc

SEQ ID NO: 462 - DNA, 317 bp, Homo sapiens
gactgaggctaaggaaggccttgtactggttttagagccctggacggagctccaggtgacatgggccttcctggttctaccaccgacctgctgggggtttcagcaagccttcaccttccacgttggcgttctcagctctaagaaaaggaagttgatttccatgagaggtgatcaaactgtgctgtagaagcctcagcgattccacagaacattagagtacctctgccaagcagaattctccacatggagaaacctcccctcttactgattttatatgccatgcatgtcaacgctctggggaagattttttgcttgag

SEQ ID NO: 463 - DNA, 308 bp, Homo sapiens
  misc_feature 247: n = A,T,C or G
aacatatacatttcggtttcaacatagcggcagccagagcggtcctcttaaagtggaagtgatattctgcttctctcctgcttaaaaccttcagatctccctatctccctaaaagcaacaaccaaagtccttccaggggctacatgaacacctgcatcgtctggagtctgctatgactcagccctcaatgcctacaatactcatgcattaagaacatattgagtgggtatggaaagtctctaaatcntctggtccacgctttagcaaacacgtctcaatatattctacttctacagatgagtaacttc

SEQ ID NO: 464 - DNA, 464 bp, Homo sapiens
  misc_feature 343, 361, 388, 396, 451: n = A,T,C or G
gtgagcaaacaggtttccaggcattcgcattccacgatttgccaaggccaacaatacactgttcaacccaacagttgttttccactgaaatatacaaacgattgaggacattgacaacatagtgcctttctagaaagatggccatgacatcgctgtgatcactgcttacattccacgctacctgatttgcatcatgtagatgtcgctgctgtgacattgatagcctgtgactccccagccttgtgaatcatgtcagcgcacataatgtgcatgaatgaaatggagtgtttttaggatgggatgccactaaaatcatcctgggttaatcctgtcatctggcggnttccagtgtctggacatntggatgaatgatctgcttgagagcccnccaaatantagtgggaggcaggggatcagctttttttcacaccctcttgagctgctgtaccgngcttattcttctc

SEQ ID NO: 465 - DNA, 213 bp, Homo sapiens
ctttgaaaatctaccattcggcccttttagtctttccggctgatctttcccatccacaaacagatgttgctcactggattcagcacttccatcaaaatccccaaaagcctttatgcttagaaatgaacagacatcaaaaaggcagcaactgtcctctttactgccatttcctcttctagggcctgtgacatgacaaggataatgcaggaggtt

SEQ ID NO: 466 - DNA, 389 bp, Homo sapiens
aagccagaggagagggaagaggttacctccacatctctcaagggctgggaaattccagaaaggtgtctcagggaatgggcagccacaggactcagaccccagaaagtgcctcgaacccccccagcaccaagagagtgtgtgaaccagtggccccgctctgtccacacttggaatgtctgcttaaggaaagatgtttctggcttccagtcttccacatcctgcaggtcaaaacagcttccatggggaagacatggcctgggacggtgccaatgggagatgtatttcttggacttgctgagaaaggctccatcccactgatggatgttggctgtgctggcagctccgcataatggaacacttcgcttgatttataaaggacccaacttgtc

SEQ ID NO: 467 - DNA, 582 bp, Homo sapiens
  misc_feature 541: n = A,T,C or G
taacctcataggtgctgggttgttctttatcaacttggtcaagctgaggattgtccccaaaatcccaacatttcgtggctctgaattagaaatggccaaagagacatctacctgtgtgtgacctggaaggtacaggtgaagcaggacaactgtttctgaagctctttacacagtggatcacagactaacaaggaggtgtcagatgggtgagcagttcaggatgagaccatttcttcttcttacctacttcatcattcacgctcatctcaatgttggctataaggtaaagggaagcacgcctcaagtgatcatgcaaacaactccagtgaagacactgcgcatgctctcttccaagtgcgggcaggcagctgtgcatgtgggcagcccaccccaaaggaagaagaatcaggaaaggaggggcgcaagacttcggacgtatgccaacgcataaaaccccaaagtcaaaagctcaaaccacacatctgtccttcaagatgcctactttggcccctttcaagaagtaatttactttcgttcattnctgctctaaagctttttaataaatggtcacttcttgctctt

SEQ ID NO: 468 - DNA, 342 bp, Homo sapiens
gtgcagccgagtctcctggcggagttttaagagcatggattctggcaccaggatacattggtcacatcttgactgctgcttacaagctgtgtgctgccggacaagttcctcgacctgtctgtgccttggtttcctcgctggtgaaacaggggatgggtatatcttctcacgggattgtcatgagaatcaacacattcccagggtggactgggaagagggtccgagactagtgggccctggagcaggtgtcacacgtgcgaggagctccagccctcaggaatagtttggagccacgtggtaggcaggaaatgattcgttgaataaatggattaaagggtgcac

SEQ ID NO: 469 - DNA, 206 bp, Homo sapiens
tcaacatgcccgagtgctgtgaacgttatgagagggccttgttgggaacacgtgctcctgggaatcagcccttccctctgtcctgttcccactcctccccgacgatgctcctgctcagaacccactcctcacctcagtgaagcaacgcagcgggcaccctgtggacaaagctggatattggctctgaataaaagcgaatcatgggg

SEQ ID NO: 470 - DNA, 926 bp, Homo sapiens
  misc_feature 15, 16, 19, 20, 27, 28, 33, 34, 36, 39, 43, 44, 46, 49, 55,57, 58, 73, 85, 128, 130, 166, 191, 199, 204, 211, 212,213, 217, 219, 251, 253, 285, 287, 305, 307, 316, 334, 367,424, 502, 546, 554, 612, 647, 712, 745, 750, 752, 764: n = A,T,C or G
  misc_feature 779, 814, 838, 849, 862, 866, 874, 880, 893, 903, 908, 911,912, 913: n = A,T,C or G
tcaagaaactggagnncanngccgtcnnactanncnctngcanngnacnttgccntnnacaggaaacggaccnggattatattanaactattcaatagcaagacactgcacacccaatgcgagaatangncgctcaattgggagacgaaaaagagtgtgaaattangcaatcggcgaagagtctacatcantggacacngcttntgagagnnngggnanaaagggccttatttccgggcttattggacctngngagcaacaaaaacaaagaacaaaattccgggntngctcttggatgccccccntngtatcccgngcgttgtcatcgcaaagngggccgccccgggttcttttttgtcaaagaccngaaccttgtcccggtgcccttgaaatgaaactgcaagcggacgaagggccaagcgcnggcttatccgtggcttgggccaccgacgggggccgttccttggcgccaacttgtgctcagacgtttggtcacttgaanccgggggaaagggggacttgggcttgcttattggggccgaaagngccggggngccaaggaatctcctggtcattcttcaacctttgctccttgcccgaagaaaagtattnccatcattgggcttgatgccaaatgccgggcgggnttgcattaccgccttggatccccggcttaccttgcccatttcgaacccacccaagccgaaaacantcgtcatttgaagccgaagccacgtaacctttngattngnaaacccggttcnttgggccgaatcaanggaatgaatctttggacccaaaaaaagcattcaanggggctttgccgcccaaacccggnaaccttgttcncccaagggcttcnaaangggcgccncattgnccccaaacggggnaaaggaattntcccnccnnnggaccccattggg

SEQ ID NO: 471 - DNA, 348 bp, Homo sapiens
  misc_feature 86: n = A,T,C or G
agaactgagatcccatatgaagaagccaaaccatactgctagagacacacggctcagccaacaagtcatcagtcagtctcaaacangacttttgagtgaagctgtcttaaaatatcaatccccaggacactcacccaacaagatgcagaatggaagcaagcgaatgaacctagcccatattgctaacccagagaatcatgaagaagtaacatagttgttttaggtcactgattttcatagtagttggtattgcaacaatgcgtaactaatacagcatattattactaaatgtttaaattgtacttaaatataagccaaaataaatgggttaatccaaaaaaaaggcca

SEQ ID NO: 472 - DNA, 406 bp, Homo sapiens
caactcctccatctttcatgaaaacatcaagaggcacaggacgaagatcaatggagtcgtaagaagattttggatttgtgtgtgtggcctctgacaaaactgtttcctttgtttctgatactccttgaaacctcgcagttcaaaacctacttttttggtttaagatcaagaaacggaggcaaagagagattaaagagcttgcccaattttagaaagctagtgagtgggacagctaagaattcatctcacacccgaccctggaactgatgctcttatcacttcactcttctgccttcccatgatgaggcaggtacatccggggcagtattgctgtctaggctgttgttacattatggtgaaagactaattccaacatgaagaataaatcaaaaatttattaattatg

SEQ ID NO: 473 - DNA, 459 bp, Homo sapiens
  misc_feature 368, 416, 418: n = A,T,C or G
tcaccttgggttcagaagctatttctgtaagctgcatcagctggacttggaccatatggcggaggcagcatctacatttgatgattcaattgacccggcggatgactagatcgttttaaaagccctttgcgttctcgcaggtcgtttgtctatatcagatgcaaaaggaagcgctgtagccacctcaaatcgccctggaatgctctctcaaatgggctggactccgtgatttgtcaaggaaaattggacattacctggtaaagttcttcctaaaccatgggcccagatgtctgcttgacagatgtcccttatgcttgtttcaatttaaagagtgtggttaaaagactttggcatgatttattttttantttggcgtatttggtggaagtgggaagggaaggggccagaaaattatntnggcaatttaaaaaccgtaacagattttgcttggcctctggg

SEQ ID NO: 474 - DNA, 435 bp, Homo sapiens
  misc_feature 358, 360: n = A,T,C or G
ccaggcactgagaagtgtacagaaagactccaactgcccgagattcccagagaagcagaacacacagagccacgacgagaactcaggatggaataaacttccaggtccatgtgagcttccaggacccagcccacatctgccaacccaccgtgtcctctgcttcatgtttaccctgcatccttttcactgatgccttcaaatatccgtgtgtgcacgggaacagtggttatgctgccaatttaaagaaccaaggcttcagaggaaaggaaactcatgcgtgcccccaccaccgactccccggttcctgctggttatttgtaaaagttattcacaggaggaagagaaagagccttcgtgngngattccctggttacattacggggggggtggaaccaaggttctctgggcagcttcctccaccatctgttcgcactg

SEQ ID NO: 475 - DNA, 238 bp, Homo sapiens
  misc_feature 207: n = A,T,C or G
tgccaggtgcaccttgaacaatgattatgactgtgactggagtacttcaacatccctatcactgacttcaagaagccctgcatcttcacaagatctacaatttcattttgcaaatgattcccatgtatttgtctgcactgcaggattttggacaatttaccttttttctctctgccctccatttctctcacctataaaactgtgacnataactgtattattaaaatgtttaaatcggc

SEQ ID NO: 476 - DNA, 447 bp, Homo sapiens
  misc_feature 220, 231, 241, 252, 257, 370: n = A,T,C or G
tgttaagtgaccaacttgaatgccagcacttgatgagtggagggaaagtaaccgggagtgattccaacaagatggcacaccacccccttacaccacattggtgaagaaagctggatgaagatttccaaagaaagcggccctggtgggagtgggctttcaggctttggcaagaatctggaattcccttgatagcttcttctggagtgcacttaaaacacanatttattccgngaaaatcaancagcatcacanatgcncatgcagggactgacagaaatgctgcattcatgtaccacattcacggaaattttgcactatttattgctcatgagggccgacatcaatcatgtgatagcaagaaatcatttgntcatggtagaatcccctagttggcaaaagttgggggttatcttatcatttgacacagggaagccccatatattctga

SEQ ID NO: 477 - DNA, 452 bp, Homo sapiens
  misc_feature 329, 337, 364, 399, 425: n = A,T,C or G
gtgcctagagtcctagagagctagagatggagggaaattcagatcatctaaacccttcagcccttcactggacagaagaggaaactgaggctccatctgcatgacgttcccagagtcacggcacaaattcatggaagaagcagcaggaaactcagttctccagtctgggtccaatgtgtgttttagaaatatctccacagggttaatgactcaatttttcatgcatgattgctagtaatgacaatcatgttatgtttgtttctgtagctttggaaatcactccttccacttgagtttcaggtcccaactgtcacacctgcaggagtganggtttgcntgaaactggataaggcctccattttgngggagttgaattgtctcttgtagcctaaaatctanatttttttccctcctctgctctcagngaacggagaattccatctcggtacata

SEQ ID NO: 478 - DNA, 190 bp, Homo sapiens
agaattggcaccaagcaagagcaaggaaccagacatcagttacggaaaatgtatccccacatcacatcatgggagcctagctcacagacactgccaatggaaattgcagaaatagatcaactgcaaaaggttacataggggacccgcatgctacattaactctctgtgaataaattacatgtaaaatttg

SEQ ID NO: 479 - DNA, 54 bp, Homo sapiens
gttgccttcagaccctgaaagagattttcaggagaaatttcagtattctatacc

SEQ ID NO: 480 - DNA, 300 bp, Homo sapiens
atgttctgttgactcacacggaaatgtagtcactacactgccattggtcaacttttcatggggacatttgttaatccaatggtgcttctgctggagacatggagatgaacccactaggcactgagaagaatgcagtgtctcttccctgcacaggattttaacttaatatgtatgctgggactggcaagtgcccaagggacccatctctacccattggctgtcagccagagaacagcctggtcttgggagtgtagatgaatccattgggtttttagctcctaaataaaaagtttcattgtc

SEQ ID NO: 481 - DNA, 444 bp, Homo sapiens
  misc_feature 382, 393: n = A,T,C or G
tccttcagaaaagcaatgcattctactgcttccacgatgtaagagaaaagcaaataaaaacattcccattggagagattagaaaaccaaggaaagaaacggaggctcttcatggtcgataagcaccccggggccagtctcctgacgtccaggccctgctgaaacgagtctgttctcacggctgctggtcagggctcaaacgacagcaccttggatccgttgtggagaacaaagagctaattgaaaacatctgggctgaggttttccaactggcttctcattttggcccggtttccaagcagtcaagctccactgaaacatacactccctaatcgattgctgtctcaacaacaaaccaatggttggcttggttaagttactancaccagggaanaccctccatgttctaagtggaatgttctgtcgcaaagctgccaaagtgaca

SEQ ID NO: 482 - DNA, 187 bp, Homo sapiens
cctcccaaagcaagtctcttccctctggcagcagagaagcggattttctgctcaacctgctttgatcaccaaatgagtcagggagaagaacatggatggaaatatcctcagtcaagaacttcacaagcaccagttgccttaaccaggggctctagaaattttctagaataaatgcttctcaatttgt

SEQ ID NO: 483 - DNA, 380 bp, Homo sapiens
actgatactgacagaaaaatcatcacatggaccctgctctcatgctgtctaccattcaacaggaaaataaaatatgctggactccacttggaagaaaatgtgtttatgcctttttaggaagtcgtgtggcagccccatagagagttggctgggtctcagcccagggccctgggccatttctgccacccagaactcagggagacagtctgccaccctcatgaggggacacccaactgacagggtacctgcagcttccctgagcttcccaggtgcctgcaagtattccccatcttcctagacctagcccctttcactgcagaagcctgcttacatttatctgaaaattttaaaagtttaatattaaatctatgatgtgtgtg

SEQ ID NO: 484 - DNA, 398 bp, Homo sapiens
acgtgagtcacaatgaaaagtcatagttggagattcctcatccggactgtagaaaaggtcatgtccctaactccagaatgccaatgataaaggcacacgtacaggcatgttagaaagatggagaagtcagaggaagatgtgcacaaagttaaatcgctctgccctttctactatcagatcatcaccaaacactcgtgggatcacactgagaaggatcatccaagtcaagagctgcagaagaaatggtgcacatattcaagagtctcacctttagcctttcctctacagcagaatcactatgctacattaatttccttctcatctgatgacttcttgagagctttttaatttctgcatctcctatttcttacccaaggcattaaaccagctggcagatt

SEQ ID NO: 485 - DNA, 425 bp, Homo sapiens
  misc_feature 301, 303, 304, 306, 309, 314, 316, 324, 356: n = A,T,C or G
atgatgggaggcaatgaggatcaggaagatgaagtgtaatgtccaatccccttgaacatggcaactctggactccctgtccagtgctctttccactctaccatgcactagttaactttttatgactgcagtgcaaattcttatcaggaatcctccaaaggtacaaattatgtccttcaatctgttctcctttgacatgcccttctcctagtctgtgaagtctgattggactgggacctatctccccactggaggaacctgtggggccatgagaaagttattttttctgaaaactcagttcntnntntgnaaaananaaaataangttaactttaccaagttgttgggagtaccagncctcaacctttttggccccagggaccagttttgtaaaaaaaaatttttccacggacccagggtggggga

SEQ ID NO: 486 - DNA, 326 bp, Homo sapiens
tgtttcctgaatggaggatgattcccacttacggaattgataattacagattgaggagagatgggatatggctaacacatgcacaggctgctgtgactctatgtggtccctgtggtccctctgttggctgtccaagactggagcatcttaggaaatggctcacctggagtaactgattgaggtccagtcaggcatgtgaggacacagtgtttgccccactggaggacgaaggaacaaggcaccatcttggaattggagaccagagccctcacaagacactgagcctgatgttacctttatcttggacttcacagcctctaaaattg

SEQ ID NO: 487 - DNA, 226 bp, Homo sapiens
gtgaatttggaaccatcttcagaatcaggctgccgtgctgtctgtcaatgtattgtaattgagacctgcaagggctcttctcacacctgggaacatcatggtgacattgcatctgccaccagctccagcctcaggaaggtagcatgtgaggacaggtgtggctagttatcatcccgacgcctggttaaggcataataaaaatcagatgctgttggcctcccatcgg

SEQ ID NO: 488 - DNA, 199 bp, Homo sapiens
gtcctggcctggcatggagatggtgagtgtgccactgttttatcgcagctgagctggaaaaaaaaatgctgtgtatccagcttccatcaccttgaataggatatccgtgataagcaaatgaaacagaataaacttgaatacataaagccatgtagcattttctgatctccctcaaaggagtctactgaaatactgaagc

SEQ ID NO: 489 - DNA, 467 bp, Homo sapiens
gtggaccacatttcccagcctccttgtgttttggtgcacccatgtgactgtcttctaaccaattttattcgagtggaaaagatgtggccactgcctcatctggcccacaaaagccttccacgtggcccctcctccttccctctgcagccacgcacacaggatccaacgcagaactgggtggcctgaggaaaggatggagcctaagatggaaagagtctgggtcctgaatccccttgtagaagaccgcctgcttaaacaggcactgaaatgccccaggagcaagaactgaaacacctactgtgttcagctgctgagattctggagttgcctgaagtagcagtcaacttgctttgcctattgcacatatacatgctcatatttaactccaattacttgatttaacaacactctacaaaagatgtttttgacatgctaagaaaaaaagcaatgaccaaacaagtacccca

SEQ ID NO: 490 - DNA, 401 bp, Homo sapiens
gttcaaggaacacattgttccctcaaaaaacagaccggcagctgagagaggatggcaatcctgatggatgagaaaaagaacagagctgtggacacctgagagaagactataggacttcaaacatcaacccatttcagttctgatgtcagcaaggagagaactggcaaactgggccaaccgtttgattgacacatagaaggccaactgggtaaaatcattactcaaagactgtatttccagtgcactctccagttgtatctggtcagggcatcatccaatgctgtggatgaagcttgctgtcatttagcaaaatgtcatagtgatcactgattgtttgcctgtaatagttaatagcaacctttctgtcaatgctataattaaaaaaattggtttttggggtt

SEQ ID NO: 491 - DNA, 469 bp, Homo sapiens
  misc_feature 425, 453: n = A,T,C or G
atgatgtcagaagtgggatccaaagtagaggttctaacgacccccaagaacactgagtgaccaaacaaggtacctgctggactcacttgtgtctgctgatctttcagggcagctggggattgtgggcagttgcacaacctggaggctggcatcatggggtcatttaggattgaatctgaaggagccgctgtggtggaaatgaaatccctgcacaaaagaagctggggctgaactatcatattctcctggaagtagtgaaccagcagctgagccacacaaaggacatgtttgacagataaagaacactgatgccaaggtctgaaataaattttttagcattaacatctgtgtctgtgcaaagctcttggctgctttcttcatttgatgctttggatgggtctggtagaatctgttgacttcactgnttaccatgctaatatctggtttaagcangctctgggtgacctgg

SEQ ID NO: 492 - DNA, 304 bp, Homo sapiens
gagctaaggactggctcaattgactataaagaatcgagaatgtcagctgaccaggcaaccaggagacgctttcctgacttccactatgcacgtgggctgcataattgtgtctgtgaagtaatgaagaacgtgcttgctctgtaacatccaaacgcgtggccaccattcacagatagtgtcctttgggaaaggtgtgggtatagatggggaatggtcagtcctatgaatatggggctataagacagcaaggctagaaagtatctgtgctttcattttttaattttatctattttttttttttttt

SEQ ID NO: 493 - DNA, 181 bp, Homo sapiens
tcttaaaattatgggaggataaagcatcaggttaaaagctacaactggatttgcgtgcctgagcagaaagacagaagaggcctgggacccaactagcatcatactactgcttcatcagccctagatgactgcctacctccctatacttccttacaagacaaaataaactccgtatttgttt

SEQ ID NO: 494 - DNA, 158 bp, Homo sapiens
tttacattcaggttggtggagaggaaagaagattgaagagttatcctccagcaattattagccatgataaggccatatcttgcaggaagacaatgaagaccagaaagtgagatcctaagctgatgattccatgtagtaatgagtcaaattaaatgatg

SEQ ID NO: 495 - DNA, 53 bp, Homo sapiens
tcccctaccagcccctcacccaacccctcccttttccccttttgcaggagaca

SEQ ID NO: 496 - DNA, 493 bp, Homo sapiens
  misc_feature 468: n = A,T,C or G
ctccggcagtaaactgtacctcaaaactagaagaaaggaagatttaacatgcaaccttcgcttcaccatctctcttccttcccatgttccagaagattctgcataatgaaaacactgtaatctctcaagaaatatctcataaagagtgcatgagaaaatcccttctccccagagcttatttctctcgcattttaattctgaatgaagggatcataaaagcatatcaagatccatgttgccccacaaaggacattctgaggcaacctgaatgcccccccacccacgtgagatagcaagtgatttttaagggatggagtaggctataaaagggagtcactgggagacaaaaggagtaaatggaagaagggaaaggaagggagaagaaaaaggcactgaggctggcgtcacagtcttgtatggaggcagagtgaatggtgcaatgaaaagttccagaagggtaaatcagangacccatatttaaatcttgaattcc

SEQ ID NO: 497 - DNA, 442 bp, Homo sapiens
  misc_feature 276, 342, 347, 367, 387: n = A,T,C or G
cttttggagcagctatggctacttagttcaaaatggaagaaaagctggattgctgctattacaatccctctatcctgtgcgaagaaagagccttggaacttggaaaagaaatttaaagcaaccacaagctacacaaccatcactatgaaataaaccctttttgtgtggcatgaaatcgctcacagaaaggcttgctcttgttctcttgatttccaaatgcataaagtaaaagtcaccccactgctaatgctaggtggttaggcagctgttcatcanaggtagtcgcaaagcaaagttttaatgtgaactctgataagctggactaatgttttttgggggaangggtntgttttgaaccacctggttntaaaacagcttgttgaaaanccctggggtaaacatattgaaatggctggggggaaagaaaaatgaagcaaagcaa

SEQ ID NO: 498 - DNA, 546 bp, Homo sapiens
  misc_feature 15, 25, 33, 36, 37, 445, 469, 505, 520: n = A,T,C or G
gactctggggagctnctgcattaantctacctntgnncacccatgtggaatacctgtgcatcagaatggaacagccagatctgcacaaacaaccaaggacttctcaggggcctctgctgtaggagtctccaagaaagaacaagctgaatactcaactcagaatcagctgaagacttgcacaaagaaacaagcttttgcatactcctgacatccttctccttctgaaaccagccagatgagagcaacagcttttttagcttagttgcccaggaggcagtttctccagtgcagggtagagagggcagccaagtgaaagagttatcgaccatgtgtgtgctgagttcagtgcagcaaaccaagctgaactgagacttgagacctcagcatccacccagagtctcaatctagcaatctgctaagggagggttgaatcctgtactcacangcccaaacaatctggcaggcacantctattttccacttctacggaacatgtgggagttgngttattaagcacggngacagttcacacagaccggaaaggtt

SEQ ID NO: 499 - DNA, 571 bp, Homo sapiens
  misc_feature 15, 16, 25, 33, 36, 43, 50, 51, 53, 57, 63, 81, 95, 103,230, 307, 308, 319, 356, 376, 396, 410, 413, 428, 434, 446,457, 483, 503, 524, 531, 542, 548, 556: n = A,T,C or G
ggttgggcttccttnnttttaaaangcaagtanccnccctttnggttgtnntngccnaagganggggaaccagaagccganatgggtcactttangccagaanccccgggaaaactccgggggaatcttccagctggctttcctttgcaaggggaatcttggaaccccccatttggctgccacattggaggataataaaagcttccacaactttcatttcaaggatgacnatgaaagcagggggcccaattgtgaagtactttttctgaagtcccaagaagtggacaacttgcacaagtggaaaggnngaaacttcgtncggaaatcccccttattgaaattttaaaagaaccggngaccgtggaaaagccaacanggtcaaggggagactggcanttcttcctcgatgnccnatggggggttaatcntttganggttcttgacancctatttcagnaaaaaaaaaaatgggaatcttttgcnttcacaatggtttttccttnttacacccttaaatccttccncctttangttcaaaaaanttcacnttttttanaataaaaaacttcct

SEQ ID NO: 500 - DNA, 509 bp, Homo sapiens
  misc_feature 301, 382, 388, 403, 417, 449, 488, 492: n = A,T,C or G
ggggaacccttgcagctgttccacctgaatagtggagagaggtgtgtggccacgctgaaacctgaaaccataacgtaagagcccaagggagactggaaactctacagccatgaactaaaagcagcgtgtgtcagccgcagaatcggataacacaaccaaaccacaaatgtgcctgccgctcaggctttaaagttctacagtagagcaggacccactgtgacttactttgtgtgatggagtcaaaccacattttttttcttctttttctcatcagacttcacaggaaatataccgtctttgntcagatttgagataagggaccccttcaccttgactcttctttgcggcatgaactcacccattaaggtgctcactttctatnctaagnccatatcatcagccncttatatttaatangcatggggggttggaatggtcttaatgtaaangggggaatcaaagctttatctattaaaaacatgggttgnaagncagactgggaagacaat

SEQ ID NO: 501 - DNA, 475 bp, Homo sapiens
  misc_feature 49, 53, 57, 309, 357, 378, 399, 409, 433, 442: n = A,T,C or G
cagaaactgagaatgagccaagtcagaagcccaaagaacgcccaagccntttnacangaaagacacagaggggtgacttcaaatgatcagtccaagagttttgcttgtgagaaggaacataggaaggtagccaagtatgacatggcttcccatagcccggctttagacaccccaacacccctacacccacatctccacgaacccacacacatcagaagagtatgcagcttcgcctgggctccacccttgacagctgcctttgtcctgggctctggggacctgccctcaagcctctaacacagacctcanggccaggaggccccaaaaagctgatgcctttgggctactggctggtgncctaaagggcatcacacacangggtcaagtgactttgtgttnaaggcccttntggagtaaaagccatcatcttttntgccccctncagtaatttactaacagagatggaggggaccca

SEQ ID NO: 502 - DNA, 511 bp, Homo sapiens
  misc_feature 464, 497: n = A,T,C or G
gcccctttccaatactacaggagacttaggttctaatagaacaaatgatgtataagaagcagcttgaaacctcagaatgtaaccacaaaaccacaacagctagaagataatggactctgttgaaacagcagagttccctgatccacctcacctgacgtgcgacaggggtgtggcttgtctcttcggtcactgccactgctcaaacccctgagggaagggggcgcacacagatggatgaatgcaggagcccaagtggaaagtgttctccgggtcccgaggagacattccgtgctcataaaaacaggaccaaaaacagatgaaattacttcgaaacaatccttgaatgatttagtgtgtttcttgacaaagggaaagaaaaaagtcatttgttttccctgtcatgagcgccagaaaggattaacgtcatttttgggcaatgggagaaaaaaatgccaaccatttgnttacagtcatcgtcaaaacccttgtttgccaanttcattttctaaaa

SEQ ID NO: 503 - DNA, 506 bp, Homo sapiens
  misc_feature 478: n = A,T,C or G
gagaagacacaagaatttggagacagcagaggatacagagagtcagccaaataaactggttggatcacctgttccagtgcttcccaccaccatacagaaccttcataaataccactcaaagaaggctcactatcaatactgttggtccgttttctctggaggagaatgtgtctctgctggctaaggctttctttatctcgtcccactctactacagcctgcagacccacccaagactgagggtgctcaaagctcagaaggcaaaggactccttgccactcaacagtatcaagctcaacacctcagccaagaagaatcagggagcacaggcacacactcaccatgctgaacagacagcgaggaccacatttttattatctgattcctatttgaccatctgatgtgcaaattttacctatcatggtgcctttgctccagatctaagtgagatcagatggaatggaggcttcatctggtcnttaaggaatctcaagttttactgatcta

SEQ ID NO: 504 - DNA, 499 bp, Homo sapiens
  misc_feature 431, 436, 477: n = A,T,C or G
ataagaaaatggaggtcacaagctggagaactccttgctcaagttgcatagctaataagggacttagctgggattcctggccagcagtgtggctccaggcctggtttctaacttccccttcttggcaaccaccttcacagaggaatgcaagagaagccccccaacctgccccatctccagctatgcacacagcctgcatcccggatcactgccccatgctgacagaagcctgtacccaaacactcttcactgggtcctgagtctcttgttctggaaggaacaacctagaaacctcgacgtcactgttcaccaacaaaaagtgaatctattacaacgcacatccctgctttgctgtttttatggcttgcctgtggaaagcagggtctgtagaagcgcactaagaaaaagcctgacagagatcccagcgacgnttcanatcagaggagaaaaatctgtcccaaccttatccgtttggangcaggggggaaggggtcttttg

SEQ ID NO: 505 - DNA, 471 bp, Homo sapiens
tagcatgacacaattccttcaagacttcccagcctgcaggagggagtcgctggctaaacctggatacaggccgggatgctacaacttgctggttgctcaactctagatggtcaactgtccgttcccagagctttggtttcctcatgctggcagatcatcactgatgtccattccttccaggtgtttagttcgtaggccagtcctgagttgttgagtgagaaagtaggaagagtacgcagtgataacatgaggagcagaacagaagactcttttgtgtgacctggaaccaaaggtcatcatgctggggcagagtgtggataggaggcagaagggactacatttcatgagcacttattatatataagaaagtgttattggctgggcaccgtggctcacgcctataatcccacacttttggaaggccgaaggcatgaaggatcacctgaggtcgagagttcgagacctcgaaaa

SEQ ID NO: 506 - DNA, 499 bp, Homo sapiens
  misc_feature 456: n = A,T,C or G
atgagaaaacaagttaaagcctagagagttcaagtcatcattaagtggaattccctctgagtgcacagttttcaacagactgctgaatgagaggataaaggcattaaggaggaacagccgagcttttattgagcaggactgaaagggtgaattggagagaggtgaagctcaagagcaggaggtggaatgaagttacagacactgagaagaaacctgtgaactcctagtgtgaaagaccaaaaggaaactcttgataatggaagacaagatgcagcctgtgtgtaaggggaaggccagtaggaagcagggagaatgtaattgttgggaaatcagtggagatataccatagcattctctctccccacggcctgcccagtgcaccaggcacactaatcagcaatgttctcattctcggaggcaggacctgctgctgtgacaattgaggctgggggtganggcatgctgatgaaactgctgccatccccaaagcctcgcttgt

SEQ ID NO: 507 - DNA, 335 bp, Homo sapiens
gattcttctcacaactaatattgatcttccgaaggacaaatgaatgagaagcctcaatgacagcaagagaaatacacaaatgtctgcgacacaaaaacacagcaggcaatgcgtgcctcttccagacatctctaaaagttccccaagtttaaactgaagaagggctgctagaaccaacgctcttcaccaatctatttctagttcactggctaaaaagtggctggagatacagtgaaggattttgacttaacaaaaatttgactcaggaaaggaaatgtctttttggtgtaaacaggtagactacaaaaggtattaaaaacactgttgctacacag

SEQ ID NO: 508 - DNA, 375 bp, Homo sapiens
  misc_feature 349: n = A,T,C or G
catttgtccctgactcccacctagtggcttcttccagcactgcacagggacaaagaaccaccactgatgccacctgagcccggcccaggagccccttgggagctgagcgcagaaagaaagcacggacacacctactcctttctcatctctcactcaagttcacacctgtcacaggggagcagcccattcttctgatggaccacagatgctccagtgccagaagatctgcagtcccagatgagcagcagcagtacaagatacatttcccactatgtaatccctcccctctgctaacagttgattcactctggggtagacactggacctaaggtgtgcatccatagcttgngaataaattaaaaagctttaatgtct

SEQ ID NO: 509 - DNA, 508 bp, Homo sapiens
  misc_feature 356, 423, 477, 486, 495: n = A,T,C or G
gacttgaacgaatttggaactgttccagagctcattgttctcaccttgtggcataacttaggtagtagggcaactcccttacccttgcctggactcttactatcaaagccctccattgataaggtctaggccgaccacaccctaaagcatttcttgtatgtatggatttgtttcttacctatacctgaagaatggcgctggtgaggtaccacctttgggagaattgagaacatcatcccttaggtgtgtgaagtgacacagtaggaagacgggcagagaaagagcccctgttccaagctggccgtcattcagctgagaagacggctttcctggaggctccacgcacaccatgccgncgcaccctcttcagctgatctgtggcccagctgcctcacggcaatacccgagcatgttttatataangctttcaaagctgctgctgctgctgctgccacttctgcagtggctatacctggnctttaatgnctctgctanacagaagcatcat

SEQ ID NO: 510 - DNA, 491 bp, Homo sapiens
  misc_feature 449: n = A,T,C or G
aagccattcaacagtggcccgttcccaaaacagtgaggtctgtccgcataatacatgtggtggctcctgatcaggctgaaggtgaacatcaacaacagcagagacaatctagaaaaactgccaggatgatcagaaggagaggtggcagggcttctcaggagttaagcttgggaacactgactgcaagcttttgagggaaagcctggcagtacagaaaggaggatgaaaaatagaaaaaatggatttgagatgtagctctacctctggggacagatcccacaactcctcacataaaagagatgccagaaggagagatcaaggttaagggtatatcacgagagactcaagacagtcaattttgatacctctaaaaaatctgtttaagtcacacagttaatggcttaaaaaatgatggcccctccccccactctagatttagatgaaattgnggtgaaatcctgagctatcttcaatgaaacatgtcttcaaaa

SEQ ID NO: 511 - DNA, 507 bp, Homo sapiens
  misc_feature 402, 406, 459: n = A,T,C or G
tttattatctctggctctctctctgtgtcagcatccaaggagctttcccgttgtctggtgaaaggcagcctgggaatgaacattgttagttctatcttggccttcattggagtgattctgctgctggtggatatgtgcatcaatggggtagctggccaagactactgggccgtgctttctggaaaaggcatttcagccacgctgatgatcttctccctcttggagttcttcgtagcttgtgccacagcccattttgccaaccaagcaaacaccacaaccaatatgtctgtcctggttattccaaatatgtatgaaagcaaccctgtgacaccagcgtcttcttcagctcctcccagatgcaacaactactcagctaatgcccctaaatagtaaaagaaaaangggnatcaagtctaatctcatggagaaaaaccacttgcaaaaacttcttaagaaaanggcttttattgctacaatgatttctaagctttaaaactggggttgagt

SEQ ID NO: 512 - DNA, 449 bp, Homo sapiens
  misc_feature 355: n = A,T,C or G
gaaacaaactgagaaaacaccagacgtggcgacatctataactttctacttatatgctcatcattatgttagtgtcatggaccttaacagttctgtctgcccagaccactctccttcctctgaaaacggaactcctagttttcctgttaataccccgcccctctggaccctgtggttcctatggcagcccggtttccagatgaaccaatcccgtagtccaggagcagtcacctgacccaagctgagccaatgagaggtctaccttgtgcaagttgatgcccgccttttctgccagaagaatatcaccgacccatcccttggttccagaccattcctgaaggccccagcagcaagngtcatgcctctcgtggcttggttaagttggcccctccttgatttgggggaagccaatggatcatcatcttggatttcagtcacttgccatcact

SEQ ID NO: 513 - DNA, 451 bp, Homo sapiens
  misc_feature 329, 349, 352: n = A,T,C or G
tgtgaattcttccctggagtgaacctcttggatgtggaacacgacagaaccaatactggtgaacaacagtcctccaagcaaatgatagtgctacatacaaaggaagttggaatggatattggttaagcaaaagcaatgtttgttgagcaaactcagcctcctcatctgtctatgggtctaagtcatcatttctttttctggactacactattctgactccttcaaaaagacctttggtcactttgatggttaagctgtttgaatgctgcagaaccttgactcaccacgtttactggaggagccacaaatccatgatgaggaaggcaagnttgcctttacttttcacagncanactccctggaaagcggttctgagacagagattggcattcaaggagtgaatgggggagtggcagagggctccttgtgtcaaccactgaagggaaaaactg

SEQ ID NO: 514 - DNA, 198 bp, Homo sapiens
gttgaaattaaggagcccagcaaacaaggacgttgcaatggcagttagaaacaacagttttgaaagggcagatgaaacagactcgctacaagacaaggggattgttgaaaagccctccacaacaaaggaaatgaactcaaatccctaacctgcggggcgttccagcaaccctgaggccaaaaataaagctctctgatg

SEQ ID NO: 515 - DNA, 461 bp, Homo sapiens
  misc_feature 337, 345, 349, 356: n = A,T,C or G
gaccactagctctgggggaagccagctgctatgctgcaaacagtcctaggggagaggacaatgtgggcaggaaataggccacctgccaacagccacctgaatgagctcagaagcagatcttctggcctgctcagcttcagatgaatgcagcctcatgaaagaccctgagacaaaaccacccagtaaggtggccagaaggatcacctctccttatttatgtatatggagacccatgagaaaaatagggaaagagcaattacaatggcaacagccaactgaatccttccacccactggattctttgatgaactgctgcagaagctcattcatgccttgngataatcnccanacaaganatccctgccttcttccttacgtaagatgttctgttgggtatgaagcaagaggtcatactcgcaattgacaagcccatgccataccaaagagtatgtgtactgcaa

SEQ ID NO: 516 - DNA, 658 bp, Homo sapiens
  misc_feature 2, 4, 14, 16, 37, 40, 44, 46, 51, 66, 70, 76, 81, 99, 115,459, 483, 492, 515, 544, 588, 591, 638, 643: n = A,T,C or G
gncngaaactggancntttttccgaggggcctttttngangtgncntgganttccttggtcttttngaancaaaancaaangtccgccaacttacaggntccttcttcttcaaangaagccaaaaaacctggaaaaattttggtcaaaggaaaaatacttctttcaaaggaaaccgccaagccggatttcttggaaatggcttggatttattattcaagccggatttcttgaatggcccggattattattcaagccgattcttgaaatggcttggatttggtggtcaagccggatccttgaagatcaagaaagggccaggtactcttgggcttacaagcttgcctcccttacaaacccttgcaaacctttattttgcccaaaggtaaaaaaacaagccggggggaggaaaaagaaaagcccccaaatcttaagccccggtcccaaaatcaccaccaccnaaaggggcattttttaaatttcancaaagaagnccttaaatttccacccttggtangggaaccacttagcctggtaggtcccaanaaaaccgtaccggttaagaaaagaaaatatttggggaaaaatantantgcttgaggtggaacttggtggtttaaagccaccaagaacttggatncccantcacaccttggtttc

SEQ ID NO: 517 - DNA, 260 bp, Homo sapiens
attttctggcaactggctgatcctgccccaaccagtgactcatgcctcaaccagtcctgtggccccatctggaggccgactctgtgcaggaggaccattttccacacctctatgataccatctccaacccattccctgccccctgcccaccaacttgttcataaaaagcctagcctcggacttctcagagacactgatttgagtaataactccaactactgcatggccagccttgagttaataaaactctctcctgcaat

SEQ ID NO: 518 - DNA, 436 bp, Homo sapiens
  misc_feature 306, 333, 341, 360, 392: n = A,T,C or G
gtttgtgaacatccacgtgcagagattggatctgtggaaacggcactgctccagagactgcgctgaaccagcaaagaatgaactgtgataacaagcagggagctctgtccctgagaacgcctcacagaaagactgaaaccacagttgctgacctgagaggggagcaggaggtggaaactggaaggcagtagtctaacatgagagctgaagaggctacacagagatgggaagatctcctaatgcactgatcatttgttgtctcacatggttaggtagattatcataccacctgcaaataattacagntttgtctttttcttcccatacttattncctctcanttttaaaaatttattttgnatcattttggctaagggacctcagtacaattntaaataatcatggttacaataaccaaatgtatccagcttagatg

SEQ ID NO: 519 - DNA, 452 bp, Homo sapiens
  misc_feature 324, 335, 342: n = A,T,C or G
gaaagtaaatataatcttatagattgatcagaaagtggaaaaagattgattcaccattttgaagaacagaagagtctaacatttgaagggaatgagaatgaagatacccacgcaaacccttccaaagctttcatgtgtttcaagttaaaaaacaggattttgtgtgtgcaaaggtgctgcaagcggaggctgctaatggctcataactgcccccttctccagagatttcctcttggacatttgcctgggaggttacctcgccacccccagcccaggggcagcccacctgcaagggctaatggacatgaagaatacaaaagaccngcccacccccntcaaggnggaaaaaaggatgcaatttcctgatgggcaaaggcaggcaaatgggtcttacttccacattgtctcaggaaacacaataatagtcacttggctctcaccatatcccctta

SEQ ID NO: 520 - DNA, 290 bp, Homo sapiens
  misc_feature 232, 233, 235, 241, 243, 244, 247, 249, 252, 255, 260, 262,266, 267: n = A,T,C or G
aaattgactgccacaacaaaacttggctcccgtataaggaaaaaggaaaaactgcatacacatttaagccgaaaactcattacagaagaaaattagaagcgatgagaactgcaaatccttctttattgcttctctaattttttcaaaacaaaacttaactactgtaacgaaactattcagggaatagttttatgattaaagaaaaaaaagtgttgcgcaaaaaaaaaaaggnngncggggncnnttnanctnggncttancnaggnngaacttgttcaaaaggggggggg

SEQ ID NO: 521 - DNA, 577 bp, Homo sapiens
  misc_feature 40, 95, 102, 120, 124, 129, 158, 193, 203, 217, 357, 376,396, 425, 437, 445, 467, 473, 487, 502, 515, 530, 535, 546,563: n = A,T,C or G
aacttgagttttggtgaaaaaaccaatgggtggctgggtnggtggcctggaccgttttggccaatcttggcttgggctggccttaaccaaccctntactttnaatcctggggcaagcttncaanggaanggaacattcttactggccaccaaagtttnaatccaagcaaaggtctaaccttgggccaccttcnttcttgggtntgggcccattggangcttctaaccaatggtacaaatcccaatcaatctaactggggtgggcttcaaccaccaagggttttcgcttctgggaatttccgggctttggcccttttccgcttggctgggcccattgggggtcacaaccccacccaanggaaagaataaaagcttcngaagccttgacttcccaacnaaacttcccttttttcacggaagaagtcnaaacaagcaagncttggaangggccctttttaaccaaaaaanggcaanggttgggccccaanttttttggggaatanttttccaagcccnccccagaaaaatcanttgangccccaaaatnaaaaccctctttttttntttttattaaaatt

SEQ ID NO: 522 - DNA, 664 bp, Homo sapiens
  misc_feature 447, 480, 498, 512, 533, 549, 554, 583, 624, 633: n = A,T,C or G
cagaaactggagggtattacacaatgggccctcggtttattgggagaatgggagccattcccaactggtgggggggaaagaattttccggtccccaggccccagcttgtggaagaataccaagtaaaggtttcaaagaatggtcaaggaagggccaagggcccggccccccccttggcttcggggccaagcaacaacaaacgccacaatcccttggaaagggaagggtcccttggaagaataccgaatggaacaaggggcccattcggggggggaaagcttgcttcaagccgcttgggaagtgggtgggacccaaacaattgaaaacttcacttgacaaaaggggaaaaaggggctctttcctcaataaacccttccgatcccgaaataccacttgggcaaaaaggggcaaacaactttttggctttgggacccttcttccccaagnttcttgaataccccctttaagaaaagaaagaanttttaggaggtaaccttnccaagaaattttcntttaccaattgggcaatcttnccaagaaaatggggcntcttngggtaatttaaatgggaaatcctaaaggnggccctttttttaaaatggtattccccaccgtttttggttnccccttaanccattcttttttttttttcaagaatgaatgg

SEQ ID NO: 523 - DNA, 451 bp, Homo sapiens
  misc_feature 326, 359, 410: n = A,T,C or G
gtctcatcctatgagcttgtgctgatttgctgatttacatatctccactggcgaaaatcatatctgttccttaggtccaattttcaagttccaagcattggcagtgtgaccacaaatatctatgatctgatgctttatttgatttttgtgtgtttgttttaatggaagtgtagaaagggagggaagaagggaggggaatatttgatttgctgtctagccaacacaattctaaaaagcattaagtggaaactgctacaagtgtttattttctaactctttctggtataatgggaacagtcaagatctgaacaagaagtcgatataanggtttgcgggttatgataagcatatcagccagnggatagactaaaccccagtgacagctgggatggttcttggaatcagacatncttcaataacatgtttccccaaagcttataaacattggtgg

SEQ ID NO: 524 - DNA, 666 bp, Homo sapiens
  misc_feature 452, 457, 462, 481, 488, 526, 547, 562, 617, 624, 642: n = A,T,C or G
cagaactggagggtcttcctattccctggagaacacaacaattattggaaataaggggcccaattaaataaacccctacaaatgggtctggtaaattggtgccaaggtgggaaagaaaaggaaatccggtggtggccttcttccgcttttaaaaatcaaaaaggcttaggaaaaatggaattaaagccttggacttggaggggaaaggggcattggttttgaaagcttgaaaacaggacttggaaaggccaaggttccttctttgcaccaaaaagggcccaaagtttgtttaaaagcaaaaggggaaaaaattattttggaaagtaaaattaaaggtgctacttcttaagtaaaccacaattttggataaagaaaaaggccaaaaacaagcctttatttgcttgggtaccaagaagaaaagttttggaggtccggtttgggggtaggaaaanaatcnaaaancccaggccccccaaaccantttcccnttttaaagccaaaaaagccccttaatttcccagggaanggggcccccttaaacctcttnttttcaaattctttnttggaaaagaaccttaaagaaagaagccttggactttaagaaacccccaagacanggggacntcttgacttcaagccttnccacgccaggaacaaccaagccaa

SEQ ID NO: 525 - DNA, 580 bp, Homo sapiens
  misc_feature 11, 17, 61, 85, 233, 238, 392, 412, 422, 444, 447, 462, 529,549, 560, 566: n = A,T,C or G
cataacttganagtcanagctctttgctgtgtcaccccaggcttggagtggtagtgggcantggatcattaagcttttttcaaangctttctttccaacttctggggcttcaaagccaatccttccccattcttcaagccctccccaaaggtagcccagggactaccagggtggaaacaaggaaaaggaaagtggctggtggtaccacttttccaaagaatcaacccttcaanggtancaggctggtcttttttggcttccttcctttgggtcttttttccctttcccacttcgctgggatgaaagaaaaaatggacaaaagcaaaagccacacatgggaaagaaagtcttgggacccttggctgactaccgaaagagggacaaacaacggnttcaacttgggacactgaancctggactgnttagatgatcagacttaggacncanggaagatttaaaccnctgggatatgaattcaagggcattatgctttttatacctacaaggtgaagccaggtcgagactcaanagaaggttaaataaactttnttccaaggacnaactgnttagaaactggaaa

SEQ ID NO: 526 - DNA, 519 bp, Homo sapiens
  misc_feature 24, 100, 159, 267, 360, 375, 404, 471: n = A,T,C or G
gagctggagcgacaacaacgacgncgtttccgtttcaaccaccttttcttgttcccgtccttgaggacgccgggccgggtcaagtggttaagccttccanccttggttgtgggaaaggcgaacagaaagtcattgggcggatggtttggagcaagaatnaagaagcccaacgtggggcaaagtttgcttcaaggggtacccgacagggtaccaatcccttgagaaaccttgggcccacccttggaagccgctatgtagaagacgcangcccaagggaaaatgcctatgatctgggaaagccaacctggctgtcctgaagcttgtaccaagttcgacccaaccttcttttcagaccacggncacccggccaaaatncttgctgaaaggcccttaaccaacttggncggacacaaaactttacccttgtgcaagtgcattgatcgacccaggcacattcaaagaaagaacggncaattccgacagaatttttgtaccttgggggacctggttgggaaacgt

SEQ ID NO: 527 - DNA, 364 bp, Homo sapiens
  misc_feature 73, 184: n = A,T,C or G
gaaaccttttcctcggagacgatttagaagatagaaggtaatgatggccaatatcagaaatgcatctttaatntcaaagatgaaaacaaccaaatggaagaggatgagagaggggcaggggcgccaagtcaccaggcaaggtttctaagtgtaaaataggaagcacacagaccttgataagtanttgatccaaagttgaacatcaacgtaaacagctgactgaatttgaagccagacttgtctgatactactgttcatgctttgaaactgcatcattccagctgatatcattaatatagcaatctgtataaaaagttcttaactgtgagacagaatccaggaatcactaacattctttaaagac

SEQ ID NO: 528 - DNA, 304 bp, Homo sapiens
tacctttggcccacagtgttcttatcttatagaacacacaattagccagtgaaaaactcataactagtctatctagtggagaaaaattcttgtgggcagtttgaaagcctctaagagaagattatgaagtttggaaccagatgccaggagacacgaggaaggctgtagatgctttgaacttgtctactggaggaatatgctatgttgtgtacttcatctctatgaatatttagcaaggatttctactgaacgtttgcagtaataaaaagtatgccatcagttttaataaagagacacccactcc

SEQ ID NO: 529 - DNA, 447 bp, Homo sapiens
  misc_feature 17, 19, 22, 328, 334, 339, 362, 391, 404, 412: n = A,T,C or G
gtccccaggcactggananaancagagctaaggaggggaagtgtctgtctgtcttgctgaaagcagctgggagtgggaaaaaatagtcttgtccacttttggctatctcaagatgaacatggagctctccagcagaggaaatgtctaggaggataaggtgacatctatcaagtgaacctactatgcgaacacatctgctgataggcctgacccatttctatcatctgagaatctcaagtagcttgtccaccagccacagagagatgaggaaactctggaaaaagcagcttgcccctagtatgtcaggtctacaagaaaagggagacanttggtngggtngttttttggggcagggaaacctncctcacaggacacgacctgggaagatcanaaaacccattggnttaagctncaaatagagaagatgtttgaaacacagagaaggcg

SEQ ID NO: 530 - DNA, 450 bp, Homo sapiens
  misc_feature 324, 340, 346, 347, 381: n = A,T,C or G
gcatctcactacaacgaccttagaggtggcataaactgaaatataaaagctgggtctatcaagcaactaaaatctgatttgatggttaaaagctggaaaaatccaagaatgaatgaaagagcttgtggataggcccagacagtgggcagcatggctcttctccagcctgggacacagctcatcactcagggtggatcctggagagaagctgcctgagttcagcctttgcctatcccagtactcactgtgtgcacccagaggagcttctgtgtatctgtgagaccctgtttcctcatctgcaataccaggactcatattctaacngggcttttgaaacctnaataanntaatgtaaggcttgggccatgtattttcttcaanaatcgttgctgtgaaagagccagtgaagtcacagagggtaaagtcaatggtcaaccttcctgattaatg

SEQ ID NO: 531 - DNA, 248 bp, Homo sapiens
  misc_feature 4, 7, 10, 16, 18, 20, 29, 34, 191, 209, 232: n = A,T,C or G
cctnagnaanaaaaantntnaaggggcanacatnaaaatcctgaacaacagctttaataatgctagagaggcaaacctcagaaaaatactaaaacagcatcaaaaaggaatcaaaataccagccacaattctatttcacccccccaacaattatcaaaataactcaactctcacccaaaaaaaaaaggccngcgaggccaattcagctnggacttaaccaggctgaacttgntcaaaagggggggggg

SEQ ID NO: 532 - DNA, 356 bp, Homo sapiens
  misc_feature 325, 339: n = A,T,C or G
gatgacgaggtgcatcactgaacatccagcccccgaccagggacctattcagaagcacgaactgcaggctgtgtcccaccatggatcacattcagcccagactcagctccttctgcaaccctgccaaagagcctacgaatgacggccccatagcccaggccactctattaatgaagaagagtgcactgggacacttgaggagaacctgttttgtctcatgtttttgaagcaagagtaaaaaatggaatgcctcaaaatgctacaatccctctatattcaggtgagggagattcttgtaattctgtgggttatgacatgatattcntttaaatatttaanaacctttggttaaaatt

SEQ ID NO: 533 - DNA, 455 bp, Homo sapiens
  misc_feature 329, 343, 363: n = A,T,C or G
tttggacctgattaaagaagggacaacaaaggccaatttgccatcaccaaaggagcagcttgacctggagggatgaggcctggaggccgacagcaggactccgtcagtgattctttcagctcttgaaaatgatccctgaatccaacggagctgcatctacagaatgaaaaaggtagaaattcttatggactggaatcttcctcaaggcttactttgttcctgggatgcagtggtgcatagaagatagggcattgactcactcagacctggcttgcccagcatgcattgcaacaatgatgtgcaagttattaaagacatgagtgaattcntgccaaattggcanaaaaaaaaccaagagttttntacaacaaaaaactgcttatggaacatatacttctgcttgagttgaatgtgttgggcttgagtgtaagaaaatgcaagctgcaaatctaaaa

SEQ ID NO: 534 - DNA, 456 bp, Homo sapiens
  misc_feature 331, 334, 336, 340, 358, 365, 381: n = A,T,C or G
atatcacagatgctccatcaaggttgaaactgtgggagctcagaaaccattatcccaaaatctagcactttgacatgagaactgaagaagaaggttttaggtctctgaccttgccctgctcctcctgtctatcaatcctttgtcatttccaaagcacagaatataagttgttctctgaagtttcttcatctgcccaaatttcagacatgccaaagaagaaaacagttaccttgggctccttttctaagcttttattaactgaactcatcttgcagaaagaaagactgaaatctgtcaacacacttggacagacttttgtcacaaaatactnggntnggtnttaaagggccccaaacanaccttgntcccagggccattggnttgttattggaagcccattggaattcttcctaaagataatttattatgctccgtcaaatcatccatacttgaaaa

SEQ ID NO: 535 - DNA, 444 bp, Homo sapiens
  misc_feature 318, 343: n = A,T,C or G
tgaaggtttgcagctccagcgagcctaaaggaggagccaggcacagcggatgaggaaatctcctgcccaagaagtggcaggaagactcctctccctgctcacacaggctcccaacatcactcccaggaaaacaagtgccatctccccacaagactgtgagctctgagcacagcagagactttgtcagttctgttcctggatgttcaccagcacatggcagcaaatcctgagagctggctgcagtcagactcttctacctgacccaggagtgaccggggcacagagctgattccagagaagtctcctctaaaacaaggnatgggaaccacttttttaaccggcnttgtttgccttttacagttgaggcactaaattcatgcatgagcggcctgggttcaaaccctcactcttgccacttcttggctgagtgacctagaaccaagc

SEQ ID NO: 536 - DNA, 502 bp, Homo sapiens
  misc_feature 18, 31, 32, 43, 44, 51, 57, 58, 61, 63, 66, 67, 71, 80, 95,238, 244, 258, 260, 323, 351, 413, 421, 423: n = A,T,C or G
cagaaactgaagaacccnattggaaatcggnnggaaatccggnnttttaanttaacnnggnanccnntccnaaagtcctnggaattttggcccanggttttttgatggactccttcccaaattttttaagtttaccggctggaaaactggatggctggcccgatcggccttcgggaaagccccggtaagaaccatcacgggatgccgaagcttttaaggtaactcttcacagtggganggacanggaatgccaggccntntgaagcccaaagcttaaagccatcatattcccggggacctgcacacattcaagatgggccggntcctggccttaactgatgacatttccanccccaaaaagaaatggaaaatgggcctggttcctggccttaactggaggacattattttggngaaaattncnttttcctgggtcatcctgggcccaaaagcttcccctaattgagcacccttgggaacccccaattcttggctggccaaaa

SEQ ID NO: 537 - DNA, 448 bp, Homo sapiens
  misc_feature 337: n = A,T,C or G
cagggaactgaaccagtgggaggaagatggggcctctgatgcctggatgtgaagaattcagctaaaattttcaatagattgctgaagggccaactatgtactagcatgagaaaatagaatccctggaactgcagacacagaggggttcacagccactcttttccaagaacctctctatgtgctcacagagaaagagtgggggcaggactagggtacagggaaagctaccctcaattctacaggagggagcagatgctactaatggaaaggcagagagctcttcaaaattacttgtcccttaaaagaacaaaagctttaaattgctggggaaagaagnaccatacactgtcatgctggggggcatctgtatcttgaggaaaatgttaaagaatgaaagacttcacccctgcagaagaacagtaagtgatcctagacctggactatcaga

SEQ ID NO: 538 - DNA, 489 bp, Homo sapiens
  misc_feature 2, 4, 19, 22, 24, 34, 38, 44, 58, 80, 183, 290, 352, 384,395, 405, 427, 464, 470: n = A,T,C or G
gnanaactgatgacacagnggngntccaaaaatnaccncccgcncaggggctttttgnttggatttccggaagaatcaangggcagctgcaatgactctcccgcccggtattattggcattggcagcacttattggcagctggcagaacccagaatgaatccacagggaatgcctggtagtanccaaatcaagtaccaaacaaaatccccgaaatggttcaaaccagacagcttcgacttttgggcacatgtgtatgctgggagcacccagtttctagtcccagaatacnccaaaaaaataggaaaacctatgtgctatgggctttgatagggaatgccagtaattagtggncctggtcttcaaaatcattggggatgtaaaanactgcaaccanaattgctttntgagtaacctgaggcataaaanagctgctgatataagtcaaagcttgcctctttttggngggccnccaacatctggtattttta

SEQ ID NO: 539 - DNA, 315 bp, Homo sapiens
gcagggagaaaggaaatgagaagcgtacggaggtcgagaggattcagagctgtctactctttaatcagaaggaattactgaggagagttagaaaggcgatgtgctcaatacaaaaccgggactgggatgagtatcaagttactgcaactcgcttccgcccagaacaacaaacgaaggtgtgtagttgggaatgagactctcaccagtgctctctgctgaagtttccggtgcatacctcccacggctactttatttactgcagctggccaaagttttatagcctgtttcatgtattaaaattcaaatgtggaaaac

SEQ ID NO: 540 - DNA, 307 bp, Homo sapiens
  misc_feature 244, 254: n = A,T,C or G
gctgttgctacccatgtgagagtaaagaagggaagttaaatcagtgctgctttccttgatggttccattgatccaaaagcccattgaagtcaataggatttcgtctttagcagaaatgctgcacttagattatctccataggaaagtacagaaaaaaaaaactgatcgaaatagctgagttactttcaaaccaccagcctgctttatttttaaacatattagaagtttcactaatctttaaagnggattttgtncactgagagtaatacttataataataatataatgcattaaagaagagaaaact

SEQ ID NO: 541 - DNA, 442 bp, Homo sapiens
  misc_feature 336, 340, 371: n = A,T,C or G
agagaagagaaagaaagagaactccttgaacttgaaaacagaccatcaatgagacagggtctcactgtgttgcctaggctggtcttgaactcctgcattcaagcgatcttcctgtcttggccttccaaagcactaggattacagatgatacaggttaagattaagctgtttctttcatgtgagtctcatcactgagatctgattccacctacaaaggttgcctctagggctttagattgagatgttaacatggactgaactgtgtccctgcaaaattcataccgttgaagccccagctcccagtgtggctgtagttggagataaaacttttttaangganggtaatcaagcttaaatgaagtcataaaggnggagctctaatccaacagggtcgatgccctcataagaagaggaagagacatcaagagtgcacatgcacaat

SEQ ID NO: 542 - DNA, 469 bp, Homo sapiens
aaatccctgctatgtgcttgtcacaggagaggcgctcaacaaatgtcagctgaatgtatcaatagaacccacacaagttcaaacgtcacattcaagtaacaagatgtttagctgggcacatggccactcaaaatgaagacttcattcttggcctgccttgcaggaagatatggccacgtgactgagatctggcctatggaatgtgaatagaaatatattgcacctccccctttcttcttcttctgatcattttatccagtttcttggaacttggatcggctgctgaaactccatctcgtattatgaggggaaaggccatagtccactagagttactggtataggaagctggaaaaagcctgtgtccccaaggaattttttgagcaacgctatcatgtcactcctggattgactgcctacaagacatttttaaatgtgagataaataaaccttcatatttttaatcaaaa

SEQ ID NO: 543 - DNA, 470 bp, Homo sapiens
ctacttcctacagggtgagcccaggacaccaggacagagctgctgccacctgcccatgtcttccaaaagcgacattttgagctcattactactagatgtcacaatacagaatagggtatacgtcgtagccggctctcagtcccaaaagcagggtatggccatgcaggaaataaaggttacagagtgctgacattatgctgatgacatgctgtcttcacccaaaaaagatgcagcaaagtctaaaactggaaagagctttggagatcaccaacttaacatctttggtattttaaagacggatgaataggtcaaggtgagaaatgagttctccagtgtcatccagccctttgatatcacaggcagagatggaactactccttcccaaccctataataataaaaatagtctactctcctcatcccacaccctttcctgatatatcctatgcaaatgcacagaagatactttgg

SEQ ID NO: 544 - DNA, 459 bp, Homo sapiens
gtttatgagcaggaaccattgcttaagaaatactcaccatcaagcagaatcatgagggacagagcaccatgaactcagggagcaaagagaacactgtgggggtattcttagggatggaatctccacatcaaatccattggcaagacctggatgttcttggaaatgtgaaacattgaaaatgttgaacattaatcttctcctcatctccagtatcaacacccaactgaggccaccatcatttcttgggtttgggtggacaattgcaacagccacctatgactgctgtgactttgtctatgactccagttaatccatcctccactccaccgcctgaatgatctcttcaaaattcacagtaggtaatgacaccccagtggaaaatgctgattgccttctacttagaataaatcccaaattctttactgtggcctataaaaccctcagtgcaatcctcaaaga

SEQ ID NO: 545 - DNA, 479 bp, Homo sapiens
  misc_feature 41, 49, 307, 441: n = A,T,C or G
atcctgaagtcaaccagggaactgggtggctctttggatgnaagaaaanatttaaccatcagagtaaagtgttctagagattaatgggcttgctgtttggcaaggtccatagacgtcctttcctgccaatacaaatatatatattgttgaagcacaagactatatccacagataggattacatgttaactgaaaagattcaaggaagagaagatgggccatcaatgaaaaatggtggttacaatgaagcaactgatttcacagctaaggcgagagcactgcacttcctcctcatgctttctggttgntaaactcccactaagaagcatgaaaaagagcaagatgcacttgaggagataaagcagacctttgaagggaaaccaaacatcagttcaagttgtaacttagagaccagaaaagatattccaagtttttgtgaagnttaaaatgtgctcttttgtatggaaaaaataaatcctg

SEQ ID NO: 546 - DNA, 408 bp, Homo sapiens
gaattgcaaggggagctgtgggcttgacagtgctggcagccattgcaactgaggatggaattaacatggaacacaacagagctggacgtctgagccctaaggacggcttttgggatctcaaatccagctatgcctgaagacctaaagctagaagctcctgtgcttttcagttacagccagtaaatcctcttttttggcttaagccagtttgaattgggtttctacacagcctgaaactgctatgaagtcaaaggtagtgttagtgctggaagacactgcatggataacctcctcaaggggccacttcactttcaccaccaaatgccccttttcaccgatccttgtctactgctaccttgtttgatagattatgtctaccaaaaataaacaaaacccgcattgagaatc

SEQ ID NO: 547 - DNA, 422 bp, Homo sapiens
ctgttattgttccttgaaaaacagtataaaacaatacaaacactcattgacatggacccaatctattcttgactttttaactgatggatcacattataatgcagaaggttccttgccctgatgctgaaaacagacttgcgaagctgaaaatgataagagtatgacttttagttttggaatgttaagaaataatatactgtcaaatcattcaatagatgacattgttaaaacatgaaacatgaatatgtttcgctaaagcatcatcgtacaattgacaattcttgtctatttttacttttatttgggcagcaccatgaacaaacttgtggggccccacgtcccagccacggatggtgcattggctgtgcctcactctgataatggccttcgtctgaatgaaattttcagtttccaaagacttt

SEQ ID NO: 548 - DNA, 322 bp, Homo sapiens
  misc_feature 2, 47, 71, 87, 94, 107, 113, 247: n = A,T,C or G
cnaaactgggggggggtcttttaagccgagatcgcgccattggactncagcctgggcaacgagcgaaactncgtcttaaaaacaaanaagctgncatttggccccanatttgngccttgaaaccaccaccgggagggcggttcccacaagcttcccgggttgggggctgaccaattctgccaggaaaactagggcgacattcccaaatcatccccttgacagccctaattcttacttttaagaaggntcttggtaccatggaaaaccgcaaatgcccggtaaaggcagatttaccatgaaagctaataaagcttctaacctc

SEQ ID NO: 549 - DNA, 406 bp, Homo sapiens
  misc_feature 11, 16, 41, 45, 53: n = A,T,C or G
gtgggggtctnttcangaagggagggcagaaaagaaagaangganggtggganctcaaagcttggggaacccactgggaagagatgggaattagaaagaagaaggggtcccgaaccagacagggacctcaagggcagaaaaccaattatggtcaattaacttcttcaactcagcaaatatttttcaaatggtcaagcacatggaaaggagccatatgaatgacacaaacatgactggaaacctctgtctgcctcccagagcttcgattcctgcactggggtctttcaaactcaggtaccaaatggcttcctccgaggggaaaaactaagtcctgccagatgcccctgggtacattactttggggtccattcttaaatttaaattaaactacttttatcccactatt

SEQ ID NO: 550 - DNA, 422 bp, Homo sapiens
gaacatcattccttctcatgcatggtctgcagtgatgggaactgaatgcaccagcagcagccatatgagcttggaggcagatcctgctccaattgagactcagctgagactgcagccccagttgacaccttgattgcagcttcataagatcctgaatcagggaatccatctcagctgtgcctagactcctaacccgtagaaatgcgaaaggaagagtaagctactctcacctgggaggtccagctggtgaagaccacaagagactgtctccagtgggaaagagccttgagggagctcatttactgcttccacatgtgtggtcacagaaagaggcatcatctatgaacaagaattcaggccctcaccagacatcaaatctgctggtttcttgaccttggacttcccaacctctggagctgtga

SEQ ID NO: 551 - DNA, 330 bp, Homo sapiens
  misc_feature 22, 76: n = A,T,C or G
atttctcatggaaaaggacggnctggagcctttgaacaggggctggggtcttccttctgggtcagcaatggggggnggaaaaccgaacgcccttcgggggaaagggagggtcaccccaagatcttcaagttcaccgaagtggcagcctgggattcaaggtccctgcctgccttccagaacctgagctctgaaacgctggactaatcaagaacctcttggcccttgaaaaatgaggcctattgaacaaagacatttgtaagaaaagggactattacaacctagtgtaaagtaacaagcaaataaaaaatgaaatggcacaactcctcccac

SEQ ID NO: 552 - DNA, 459 bp, Homo sapiens
  misc_feature 441: n = A,T,C or G
tgtggctgggaactgctgtagctattctgagaccacgagaggagtcactcggaagggaaagccgacatcgagtatcgggagatgaagggaaatgaagagacagcaactacccgaagccctgacggcatcgctgggctgtcaatcaaccctctcacttctctaacttgcaacttacttcacgggatgtttttccctatttaagccattttgagcagggtaatctgttatatgtggttgagagcagccaactgctatactagtctagagagctaaacccaggcacccccttaacaatcgtcagtcagagtgggtcaggacaataagcacaacctgcttttccagactcctttgtcctcctccctgaatgctgaagaaacaaccttcccttctggtcttcatcacacttctacacacccatctgcactaattccactgtgctgngatctgctttgtatacat

SEQ ID NO: 553 - DNA, 472 bp, Homo sapiens
  misc_feature 300, 413: n = A,T,C or G
ccacagatccatgatgtgcagttctcttggagcaggcgctggcttgtgctggtcactacctttccacaagtacttccttgccaagaaggccgaacaaaggttcaaacctgaagttaaagggggggaaaaatgaaagggaaactttcttgcaccaaagggaagcttgccccaagctttttgtgggggggaagaaaaagtgggatgaagggagggggcttgaaagaaagcctgatgggcagccctgggatgaagaaacaagtgacccaagccaggtgggaccttccagggaagtatgcctgnttttcctggcacttcatcactgtcatgtgcaatgacttctttcagggcttgcccagacccgacccttgaaacaaaactcttgactttctgccatggatctctttggggcccangactggtggatgcctttgaagttttgtattcaataaaactttttttggctggtgataat

SEQ ID NO: 554 - DNA, 440 bp, Homo sapiens
gatgggtgtgtgtggcccataaatcaactggacgcacttccctttgtttgcacactgccaccgacacaggcttgctatgaagaagaagaaattttgctcagaggaaactagaaaacctgaacgtgtacacaatgctgacatattttgttgctttcacccctcttaagaatttctaccattcctttgagaagttgattatttttaaaactgtgtatcattttgccttcttgggcaaattgcacagtcaatgatatgtttcaccgagtatgtaaatcccttttacatatttcaaaataatatctaattaaaatgtcaaggttatagctcatgaggctagagtggacagggctccaccccctccctcagcctctcaaagtaacatttaaagtatgtcctataattaggagcaattataaattccaattaaaaagaacctgcat

SEQ ID NO: 555 - DNA, 516 bp, Homo sapiens
  misc_feature 2, 3, 15, 33, 37, 55, 64, 76, 172, 349, 384, 407, 418, 465,466, 499: n = A,T,C or G
cnnaacttgagggtngagagaaatgagggcatngccnataacttggaagttcttnaagtttacnatgggaaagccnggcccggtgccagtggcatgcccctggtaattcaccacaacttcatggagattaaagcagggagggaccttcttgagcccaaggaagttttgaggnttcaagtgagctatgatcatgccactgcacttccaacctgggcaaccagaagcaaaaccctgtcaatcaatcaaagcaagcagaccaagcaagggaaagcaagcagcaagaagcctctgcatgagctcatgaatggctgctgtggaaaattactgaccgtcaccagctgaataacangctatctggagagtaaagccagatgaaactgatgntaaattatcaaatgtaccaaganttttgggcttnctggccaaaaccttcattgggaacttagaagagaaaaactggaaacnnccagagcttttttttaagcttctgagcccacangctggtcctacatccct

SEQ ID NO: 556 - DNA, 407 bp, Homo sapiens
  misc_feature 30, 32, 33, 34, 39, 46, 48, 49, 53, 61, 64, 65, 66, 73, 80,86, 109, 117, 135, 156, 159, 184, 189, 255, 322, 325, 361,363: n = A,T,C or G
gactctggggagctcctgcattaagagctnannngattngaacctnanngaanaaactgcngannnagggagnattgaanctactntgtccactggaccttgttcccangctccggntgaagctgaacactccgnatgatctccctgccaccatancangctatgaagttcattacacatgcangtagnagacaatacagctctgcttccatttctgagcacctacggtaagactgccattattcagtgtgccancctgtttccaagcctacaatgtatagttcctctagtacgtaaactcattttttttctcagagagccnagnagagacacaggcagttttcttttcaaaatgtgccananattccaaaacaatctcaaagcattaaaggctatgtgcacaaagt

SEQ ID NO: 557 - DNA, 368 bp, Homo sapiens
tgaaaacaacttgggagtagtaatgaagatgaccagaggccagcgagctgaaagtgtttccagcaaagcagccctctgatccatatactttagctacaacttacatcaccaaggtccatattatatactgtgatattccagctgcacagcgaagaatccgtcacctgctgacaaaaacaaatgatgctgagaggtttgggcacaataaagtggataattatacacaggcactttttcccatgcagcattctttaaggatgtgccagagtatcttgaaagatctttgaagagctatgaactgatagaaatacaatcttggatttattttttaatcatttgctagttaataaaattactgctttcaatgt

SEQ ID NO: 558 - DNA, 340 bp, Homo sapiens
ggtctcgctctgttacccaggttggagtacaagtggtgcaatcatggctcaccgcagcctcaacctcccaggctcaagcactcctccctcctgcctcagcctctcaagtagatgggatcacagggtcttactcctacttggaatatagatgggatggagctgagtggctaagtacaaagctagaagcagcctggtccagatggctatacaaacccgaaactgtctacacccagactttattcttctacaaccaaattcctcaaacacacaatctgaacagtagcagtgaaagggagtttaaggtgggggtgaggggagaaagggagtaatatggttttta

SEQ ID NO: 559 - DNA, 377 bp, Homo sapiens
  misc_feature 158: n = A,T,C or G
acatgccaagcttcagctgaaactcaagcctcatgcagttttctctgcttggaatgttctctgcccagccttcacctgcccagcttcttgtcctacaggtctcaagtcaaatgccttcttctcagtgaagacttccctggcaccttgtcaacataaangtcatctggttattctctctccagcctgtggcctattttttctaaagaacttttcagaatctcatccatatcttggtttacttgtttgtaaccagtgtctctcctccagaatgtaagctccaggagagcagcacttcctccttgatgttattcctgcttcaatccttagcgtctagcccagtgcttaatacagatttgttgaataaagatccgttaaag

SEQ ID NO: 560 - DNA, 466 bp, Homo sapiens
  misc_feature 368, 374, 396, 412, 418: n = A,T,C or G
gcacccagtgactttggcagcttggtaactttaggaaacaaggcgctcccacccacgctctcccacctctttattctgctgtgtctgctgccacctccagcgccttttcaacgcttccttctcaactcccttctccatcagtgcatacaaagctttccgcagcatcaagtcccgatcatggaaaccccacattcctgtggcaaaaaagcataatggtgaatggaggactgctttcaagactcaccaagggaggctgcatgcaggaggcagttcccatctccagtagttgccaaaggaagcagcctctgagaggtgggatccacactcacccaccagttcaaacgccctgtagaaacaagatagtggangaaaangagaatattcatgaagcccttnccctttctatttttgnaaaaanactccaaagcagcctcctttaggaggcctacccagaataaaaccatcc

SEQ ID NO: 561 - DNA, 455 bp, Homo sapiens
  misc_feature 374, 386, 405, 410, 427, 440: n = A,T,C or G
gatggtggggaacatggcgagaccagtgacttccaagagcctgtgcccattgctgcacttttttttgctgtgaagtgagtgccttgatcagaacagtgaaacggcgttttgaagactcagatacagtgccaggctaagaagggagctgctgtgttttctggggtgattggtcctggctaccaagggaaaattgggctgctactccccgacggagttacaggataccaaagagaagagtaaacatgacccaagaaccctacgtcctcttctggggaaggtttagtgtgtctctggttttacccaagatagttgaatcaggtgcagagggaaggaactgggagcacacagcaagaaagtggctgttcacaagctangacctgcccttntggcccttggttttgggcnttccngcctccaaaattggganaaaaaaataaatntttgttgtttaagcc

SEQ ID NO: 562 - DNA, 56 bp, Homo sapiens
atgctactatccttcaagatggtaattaataaaagacagaaaaatgcctaaacacc

SEQ ID NO: 563 - DNA, 397 bp, Homo sapiens
aaagtttgttgactcatgacctagatgactgcaagagcctacaatgaagtccctctgcaaacagaagcaaaaggcacagtctgctcctcctaaagatggtcattttctgctgctatggcccagtttgtgccttcaaggactgactgtgtaaaaaagagcccagaaactctttgaactgacttacagtggcttcttcagcagtcagctgtaacgatggctggagcacctggtacctgagtgagggccaagaatgggctctgcatgtgccctccctcaacaattgcccaccacccattctcacacaaatgcagtgggggatgaacctgtagggatgggtaatcagcctgaaaggaacaattttgcatatgtgtaaaatctgaaaaaataaattattatt

SEQ ID NO: 564 - DNA, 358 bp, Homo sapiens
gtggggtctttcagatccagtaaagaagatcaccctcaccgatcccagtggcatcatcccatcttttgaaggcctggaaagaacaaaaatgtggagaaaaggaacattttcttccggtttgagctgagacatcatcttctctggccctgagacatcagagatcttgcttctcaggtttttggactcatgccaggactcatacacattattagctccctaattcacagcccttcagatttagactgaattacaccatcagcgtttctgggtctttagctattaatagcagacagcagatcatgggacttcttggactccgtaattgagtagtcaattcctataataaatctcttcatat

SEQ ID NO: 565 - DNA, 351 bp, Homo sapiens
  misc_feature 250: n = A,T,C or G
aactgaggtggcagtctagtaagatttaacgatactgtctgactggagctggaaagcagtgagtatggctgctatcggagaggagagagaaaatcaatctctgtgggctgctattatccagaagaaatggagagctcccaatgaccaggcattccaccgagcaacagggcttacttgcctctgctctcattgaaaaccacacagagcatgcaacactttgctcactccaaaactttatgactttcttcantttcaagcaatgttgaatgctgactcaataagatacaaccaaaacaacttgttgatgagacaaagctgagtttattttttaccatggtaaaagtgaacgct

SEQ ID NO: 566 - DNA, 433 bp, Homo sapiens
  misc_feature 373, 375, 389, 395, 405: n = A,T,C or G
actcccccaggagcacagcaagttctccagggtgcggagaggcagtggagagtcttcaggaaaccaggttccgaagcctcaaaacactcaagttctcttttcctacaacagaccagcctgtgaatgttcactaattttcaaccaaatgatgtgctgtaatcaattacactttaattactcaatccagaaaaaagcgatcacttaaataagcctcatggtcagagaattttctaaaaatttcaaattgctttttttccctaaaggaatgtaataggatgacaataaaagatcctcacgaataaaaatatatgagaataaaatcctggaagtaggactgtaataaaagcataactccaaaaaaaaaaaggggccngnggggccaattcagnttgganttaaccgggntgaacttgtttaaaagggggggcccccc

SEQ ID NO: 567 - DNA, 40 bp, Homo sapiens
gtttgcatcgccagcttctatatattacggcctttttttg

SEQ ID NO: 568 - DNA, 398 bp, Homo sapiens
  misc_feature 356, 368: n = A,T,C or G
ggtgaatttgggacccaaacagttaagcaaccagccaatttgcttccctgctgcctcccagccaaggagatgaatggaatgcacatgaggtcgcttggcaggcatccacattcctatgggaatgctgcagcagccagagctttgggacatgaagaagcaaatgtgtgggagttatggggcaaactgcaaacaatccaaagtcccgaaaaaatgcatggagcctctttggcccaaggatgctctgcagaacaccggcaaagaccctgcccttgcccaaatcaatgatagaggcaggactcggcactgccctgttctttcttactgctgccaaggccttgaatcgtacaggccacttncaggactactgnggatgtgagccatttaaaagaacttcaaca

SEQ ID NO: 569 - DNA, 340 bp, Homo sapiens
atataagaaagattggagaactgtgtgcctggcaattgccttgctgaaaggaagccctcagaaaaagttgtttgatggtgagagctggccaagccagaaagacaaaccaagcgactttgagtgggggctttgtgtcacaaggcatcagtagacctggagactgagttcaggcaatcaatcaatcaatcaatcaatcaggcctacagaatgaaactccaactaaaaactgtggacaccaaagctcagctgatttcctggttggcaatactccatgcatattgtcacacatcaatgccagctggtcaagtggtagaggacaataaaaagttttcacctttgg

SEQ ID NO: 570 - DNA, 434 bp, Homo sapiens
  misc_feature 67, 87, 177, 199, 279, 343, 420: n = A,T,C or G
catcagagggctccttggaaatgctagataccaggaagaaagggaacctggttaaaaaggaaaaaantaaaagggaaagccttttgnttccaccaattcttcaaggaaccaggaaagggaaaatatttgggaaaaaggtggttttgggagggaaaggaaaaagggccaaaagaaaantaaaaggagggcatttaagtantcccgcttgcaaaagctttggaaaaaagaaagccaatggaaagggatgccacgtttttaaaaggtccggtaggaaagaanggaaaaggaaaaaaaattttaagggaaaaagccgccatgcttgaaagaaaaagggggaaattantgggaaggaccaggaaccatgccaaaaggatccaaggaaaaaaggtattcttcaagggaaaattcaaaaaaggcctntttcccaggaaacc

SEQ ID NO: 571 - DNA, 483 bp, Homo sapiens
  misc_feature 401, 430, 467: n = A,T,C or G
tgatgatacacagcaggacaaccagtcctgaaaaactttgcaaaattgatcataccctggtgctcctcctttaacagacatggcagcccctgaattccagatccagccccgcctcccaggtctgctctatcttcagccttacaggaaccttgggcggtgtctcctgactcaaccatgtgtgacaagaataccagctttcccccatctctgagcttctaacgttttttatgcctcccccgacttcaaaagtgttaagagttcccatggggatggtgaaatgggccattcctgaatggtataataaatctcaccgaacttcaggcatgcctgtcatcagccaagtcctctggtggggctgctggcatttgaaactgaggcttctcacaatggatttcaatttnttcggttctcaagtcaaactttaagttantttcaaggggtcactcttgtgttaattagcttttgangggagagtcacaaata

SEQ ID NO: 572 - DNA, 676 bp, Homo sapiens
  misc_feature 511, 548, 560, 579, 590, 603, 611, 663: n = A,T,C or G
agatggggtttcgccatgttgcccaggaggggcctcaactcctggggcttcaaagtggaatcttggcttccccaacaacaaccaacccggccttcgggccctccccaaaagtggcttgggggaatgaacaagggaagcccttcttctttttccaacccaagccgggaagggaagggaagaacaaggaatgccctttccaagccttggcttgggcttgggtcccccaagggaacccccaacttggcccacttggaagaagccttgaccgaaggttgggtccgaagttgccaccgccaaaggttattgttgccaagcctttgggaagaagggttgccaaagtggacccgttgcccttgaagggtcttaacggggcccccaaaatgggcaagaatgaagggggggcttcaaatttccaaggctttggtcttgtgggggggtggcccttcccttgggacacaaagggaacttgcccaaaccccttgtggttggaaatgtgaagcccttcaattgnaaaaggaagaacaaggtggaagaaaagccccttgaanttgccttgggtnggccttgtaaggccttgcnttaaacttgtnaaatacaagaatnaaatggtncccaaaagccaccttgggtggggcttgtggaagcctccttcaaaccttggtnaaaataacaaaaa

SEQ ID NO: 573 - DNA, 390 bp, Homo sapiens
  misc_feature 66, 82, 96, 110: n = A,T,C or G
ttcaggaactgagtgctggccctggtcacattaagggagccaactggtctggctttgggtggttangtaggaacattttaancaagcccttcttcnattcttgggcaaangttcaaatttggtcaaccaaaagccgcttggcattcagggaataaaggaaaccctttcaagccaaagccaaccaagtggacctaagcctggtggaatcctaaatggaataaacccttttccatttttcatttttcattaattttaagaattttaataatttaccctttctctttcttatttaaaaatggggggcctagtttgtcccattgggaagggaggtcattaatgaaaaattattctttcttaaaaaataaaaatattatttcaaaatattttttt

SEQ ID NO: 574 - DNA, 606 bp, Homo sapiens
  misc_feature 62, 375, 388, 437, 450, 530, 539, 568, 571, 574, 577: n = A,T,C or G
ggattctaccatcaagaaaagaggcccaaactttctattcattcatgggtgggaaggtgaangtggtcttggagtggaactggtaaaattggcagaaacccaactttggaggaaagcttgggattttttcacccttgggccccaaataccttaccgttggggccttgcaaaggaagccacccaaagcacccaagaaatcacattattggggacctatcacccaaaagaagaagaagactacttgcggcggaaagacccagactattcgaagaagctggaagaagaaagaaggtttccccaagtgggcttgaaagccttgcttgtgcttggtatttcttcatcaattgtgggtgttttgtcctaccctggacttgngggaaaaataaantcgcttgtttgggttaaagtaaatttaagcagccaaaagcaattgcttnccaagccgaaggncctccttgctttcaaggaaaagaaacccaaaaccacttaccccttgaaaggggccaggcctaagccctgcaagccccttncctttgcangggaggcctttccctttgcccctggggcntgnttnttnacaaaaatcgggggtcttggggcttcaaa

SEQ ID NO: 575 - DNA, 468 bp, Homo sapiens
  misc_feature 389, 391, 412, 437, 442, 449: n = A,T,C or G
gagatttctccctctgcgctgaggatctcactgtgcacctccagccctgggtcctggtgggctctggtggccactggagtctttggaactgcctccctctggctctgctggggttggattcgggcatcgatgtcacacccagcaggaacaactggggccactggaggattcccaaggacacaggttgtccttttcatgcaggaagaatctgaatcgtttccatccagtttccccggcatgcagcagaatacaacacaaggggctgcggtcttctctgactcttaaggcccttggaagatcctgttctgccaaaatcagggtgatttgggcaagcatccttagggctctggaccttaatttcttttcctgggtgattgattgacatatangngtcctaactcacataagttgnaaaacaaaatgtgggggaaagggcnttganaccaaanacaatgttattgtcctgaa

SEQ ID NO: 576 - DNA, 403 bp, Homo sapiens
  misc_feature 55, 78, 380, 382: n = A,T,C or G
aaaaggctaacattcttgaaaaagagaagatgtatccaatgggcgccttttcttntgggaatcgagctgccattcganggacattcacttgggccagaagatcgtaccgacatggctgctcaaacgaagtccagatgcccacatacctgtgctctttgccgtcatgaaactggaaactacgcatttgctccgggatatcctgttttttaatttcacaacgagatggaactggctgaaactggacaacaccattggaccacactgggacttatttgtgattggcctcattgttcctgggctgattttgttgcttagaaatcaccaggggtaggatgcggatcacaggaaaacctgctcacaggaatcaagttcacttccangnattccccactaaataaacaag

SEQ ID NO: 577 - DNA, 469 bp, Homo sapiens
  misc_feature 357, 404, 419, 424, 430, 448, 453, 455: n = A,T,C or G
ggaatatagagggaatatgaatgacatcacagcagctgccttggagccctggagcctgaagacatttgagatggatacacctaaggagaggaggagaaggtggcaggcagatttgaaaaaaatgtggattaccattaaaaaaggatttgtaagcaatttcagaaatataatctccaagcctcaggaattattttacccttactttttaagaactggtattattatactcataatgagagtcataaattatgaacaagaagaaggttggttattattatttgtttagtattaccagccttttcaattccacacaagagggtaacagaaacaaagctgtgaggatacccttgcagttgnacattcttgggaattttgcatttaacaagggaaaggatcatcactgnaaatatattttcaanttggnaacaanctgagactcataaatggngattntntgacacataacaag

SEQ ID NO: 578 - DNA, 371 bp, Homo sapiens
gcccacactggagaagcggcaggcctccactgaatggtcgaggtccttaactctcctgccagtcaatactgtctgcctgtcatattgccctaaccttggtgaagacacttgtcaaaatgaacagcgacacatgcttctgactcttaaagaactaacagcggatcctggaaatggaagctgggtagtaatggaagctactctcctacacaactgagatttctgatcccagacccccaaatataggaataaatgagctactgaaccacaaaacccaacacaaggtcacacacacttgtaaagtggctaactgctttcattgttttgcataaaatgtgtattctgcaaagattattattaaaaataaaacaagc

SEQ ID NO: 579 - DNA, 345 bp, Homo sapiens
  misc_feature 34, 44, 46, 50, 77, 86, 109: n = A,T,C or G
aaattccaggggactaatattggagaatgaaccnaggctgggananccancctgcaaaattccaaaaaggacctccnggttggttngtctacaacccagccatcgtcangataacattagactgcgttccaggtgggaccatgacttcaaggatagcccccagaccaagggcccgggccacctaagcaccccagcacccacttcctggcatgcctcccactctaagttcccctttataaaccacctcttccacaggtcgaaagtttggaaatcgtcttttaagggcattgaagcttggccattcccagatcttggcatttgaataaagtaagctctctgttcatc

SEQ ID NO: 580 - DNA, 501 bp, Homo sapiens
  misc_feature 33, 36, 43, 50, 52, 53, 57, 58, 59, 66, 70, 76, 80, 82, 87,103, 185, 378, 400, 407, 411, 434, 438, 480: n = A,T,C or G
ctacttcctacaggggtgagcccagggccccanggnagaactngtggccncnngccnnngttttcnaaangcgacntttngngctcnttactactagaggtcncaatacagaatagggtatacgtcgttgccggctcttcagtccccaaaagcaggggtatgggccatgcagggaaataaagggntacagaagtggcttgacattatgcttgatggacatgctgtcttcaccccaaaaaaagatgccagcaaagtctaaaactggaaagagctttggaagatcaccaacttaacatctttggtattttaaagacggatgaataggtcaaggtgagaaaatgagttcttcagtggcatccagcccctttgatatcacangccagaagatggaactacttcnttcccancctnttattattaaaaataggctactnttcntcatcccacaccctttctggatatatcctatgcaaatgccancagaagatctttgcaactggg

SEQ ID NO: 581 - DNA, 443 bp, Homo sapiens
  misc_feature 339, 355, 391: n = A,T,C or G
aaaagaaacatggaaagaagggtcagggagttggaagaggagagaacatgacatgcgatacttccactttcttaaaggcaacactacataagacatctgcagcgctgtgctggtcaacgctagattggtggatgctataatggaaatggacaaagggtctgtgtatcggatgtcaacataccatgccaagaagccatgtaaatgcaccaagagatcctgtttttgaagtctcctctttaacacacagaatcaaaatggcaacatccatgatggagaaggaagagggtccccagcccttaccagccaggagaactcttgatgacctttcaatggggcagncatgccttggcatcanaaacctcaagggagttggctttttttccattatggncatagtctggtaacaaatcatctgtttaaaaataatatataactcgagctcg

SEQ ID NO: 582 - DNA, 336 bp, Homo sapiens
agaaggaagcagatgccctacaaagcccatgtatagtcacccaacaaaatgtactggacgactgccatgcaccagccattggagctactagctcctgagaagccacatcctgactaaatcagcagaagccacgtcatccagagataatgggatggagacaggggtgcctctgaggctgaggtgactcccatagggatgggtagctaaaaatgaagcatagagtggcccgttcatctttcatcttccccctctctcgggattgctttgctttgctttactattttggctcctgagacaagaagctacattccaataaagctttcttaatggacactg

SEQ ID NO: 583 - DNA, 483 bp, Homo sapiens
  misc_feature 13, 14, 29, 32, 36, 381, 418, 434: n = A,T,C or G
agaggctgtgatnnctggaatgtttaatnggntggntgattggacttatgcctttggtcagcagctcaaagaatgctacaattcactcttctacaaagcagacatccagccttgatacccaacccagaactctgaaagaatgaaaatttgccatctctagcaggtggaattatcagaggcctctggaagctgccatggaaacaagctcactaaaggcttcagcaactgctcagatatttaatttcacccacagtgaatgtaatccaggcaagaagtgctcacaatatgaaaacattgattagcaggggactgcatgtgtaccttgctgggtacaggccccactttctttctctttgaggacgcttagcttgaacattccanggggaaagacatccaaaaagcatcgccacaaaccagntgggaagctgaccaanaaaatcatgggttctgcccgcagggaggaaaacacagggtaaatccttt

SEQ ID NO: 584 - DNA, 294 bp, Homo sapiens
gactgaggctacccaacaaatttcccagccttcctgcagtgaggtgggagccaaatgactaaattctgtgtgttggagagataaatgccacttctgggcctgacccctatggcccctgccatgctggcctgaagaagagggtgcagtggaggatgctgaggccatagggaatggtggagccattagacagagaagctggtcccagaacttctgcaagaagcagagtcctcctttcatccataatgaccaccactgaattgacagcacaggaaataaaacgttactgtgttagcc

SEQ ID NO: 585 - DNA, 66 bp, Homo sapiens
  misc_feature 1, 8, 14, 20, 24, 34, 37, 39: n = A,T,C or G
nttggacnactatngtgganccantgggcactgngcngngaaatgcagagctgaccaggcatgagc

SEQ ID NO: 586 - DNA, 343 bp, Homo sapiens
accttgagaacatgcctggactaccgtgctggaggaggacagacacatggagcatagcccgagtcccccacccggtcatcccagcagaaacggtcctggaccagccaccaccagccagctcccaggcacatgaaggagtcccgccaagatcagcagccggcaagctgacccacagccaactgcagacgcatgagcaagccttaagcagctgaaatccaccaagatcaactgaagtctccagttctgggtgccagtatttcttgttgtatgcccagaagtattgtggctctttgttaattgattaattaataatcatggataatataacagatcattggccaag

SEQ ID NO: 587 - DNA, 409 bp, Homo sapiens
  misc_feature 19, 33, 62, 88: n = A,T,C or G
tgtggggagctacactgcnttaagtcatgaacngccaccttccgtgacgctcacagcccttnttgatgtcatccagctcttatccacnaatcctcagctcaccatggaaatgcggatttccccaccttcaatctgccccatcacaccagtgatgtttcagttcactttgcactggttcttctttccacccagaacactcttgtgccaggcggacccacaacgagttctctaattaccttcaactccttgctcctatgtctccatcccaacaaggcctacccagaccttccaatcgactatggtaactgcctgtctcctccccacccagggccatctccagaactcccaacccccactatttttctccactgtcttttctttatagtactttatcttttaaaaaggaatg

SEQ ID NO: 588 - DNA, 396 bp, Homo sapiens
  misc_feature 6, 132, 139, 145, 146, 149, 156, 166, 172, 175, 180, 181,203, 232, 240, 244, 259, 277, 370, 379: n = A,T,C or G
atgcanaaaccacggcccagggaagacgcagcttgagcaaggtcaccggcaggccatggttttgcgggaggaggagctacagtcagtctgccttggagctcaccaccgtgtttggcccatggtagatgcccnacagaanacacanncgntgttganggctcctgtnaagganaanctgcnntacaagaaggttgagtaactancccatcactcagctagaactggccaccancatggatnccanatagccctactccanagttgcccatgctattanccgtgacgccatgctggctgtccacacccatgcctttttcctgccttaatcttgcaatgattcataaggaaaggccatattatgacacagctngaaggcagncatctgcaagccaggac

SEQ ID NO: 589 - DNA, 410 bp, Homo sapiens
  misc_feature 150, 297, 357, 374, 386: n = A,T,C or G
accagccaacacttacggaaaatagaacctacgttgaaatattgggggctggtttcctctatacaagaggagtcatgaatatttatgaaaggagaaatcgcacatgcacaggatgacctgcctgcagaaggagctacccactgaaggtcncttctctgctgagagctggacactcattgggatgaactgcctgtggaaaggagctacccactttgggtctctagagagctgttctgttgctcagtgaagctcctgtgcatcttgctcaccctccaattgtctgcatacttcattctncctggacatgggacaagaactcaggaccaaatggtgggactgaaagagctatgacacaancagggctcaagatttancagccaacaacnaaacaaaataaagcacaataaatg

SEQ ID NO: 590 - DNA, 335 bp, Homo sapiens
aagttccaggggctaatcttgagatgggcagaccaagcctggagacccagctgcaaaattccagagattatctcaaggtggctagtgaacaacccagccattgtggagatgatgtcagcccatgctccaggtagactgagacccaagacagccactggaatgagacacacagacattgtattcagtctaattcttgcatgccttccatatcaagtttcccctttttaatcccttgccccttgtctttccccccaaattcaaagtggtcactttggatgggaatccagccacttcccattactagttttggttaataaagtcactttctttccacc

SEQ ID NO: 591 - DNA, 405 bp, Homo sapiens
  misc_feature 383: n = A,T,C or G
gtgctcctttgacattgtccacatctggaacccagaacctccttctgcgtcctctatcccccatcccacattctctgcctctcctgctggaggaggctaacaccaactgtgcaagtctgttttgctacaagtcacactatgagaagatctgggcattggttccccatcacctgggccaggactgatcctatggacctgctcccactcctgggaaatgcggagataggatcgtccagtatgcctgctaaggctgatgttcagattaaatgagatcacagaagatgggcagctggttgcacttaaaggagctgggaaatggagcccagtctgctgtgatgggtcctggattaccaacacaccttgctgtggaccttggggcaganggcacttcaactcccaatttct

SEQ ID NO: 592 - DNA, 211 bp, Homo sapiens
ctgtgtttaacaaaggtcgtcgggggagtgactatgccccagagtccaccatgagagtgctgaagagccaaaggtgatggacccctctgatgcttccctgccatcagtgagagaagcctcatgtttatgtattttctatgccgagatttcactcaatatttaatgtagaggagggatttggctgtctaaaataaatactattattattttt

SEQ ID NO: 593 - DNA, 397 bp, Homo sapiens
agatgaagaaattggggctcacggattaagtgacacctatttttcatatcacacactacaaaatctcaaacacagtatctcaactcatgaaacattcggtcctaagatatcaagtgcaatctgattccagcctgtgcattttgacaacctttgactgctctgccaatcgccaggtgcccctctccagcccagtcagtcgtttctggctccattcataactctgccggatgcctcattagagaagtgtcctgagacttcttgtgagatatgccttcctgagacctacccaatgtgcccatgctgactcctaccagacagctgagagaccaactcagagaagaatagcaaagaaagcagaaaatgggaggctttatcccagtgcccaatccctgctagc

SEQ ID NO: 594 - DNA, 420 bp, Homo sapiens
  misc_feature 106: n = A,T,C or G
ggacctgggagtgcgacatggtggcctcaggggaaaagggctctcgtctagaccttctgactgtcctctggatcttcctggtgtccatgcggggctgctgctctgngctggccccagggcctttggccagtgtccatgagacccggaattccagcaaccagtttgacaactcctacagagaaacaggatccacataaggatacagcttcttcatatccctgtccatgacttcaccctgcgttctttcaaccaaatcaaatggtggtcagggcctcttgagcccaggcctgcaccgtattacattccaagatggcattgaaagtaacttgagggaaatcaccaaaaagaaagtgaaactggggccgggttcctggccttaactgatgacattaccttgggaaattccttcttcctggctca

SEQ ID NO: 595 - DNA, 316 bp, Homo sapiens
gagtatgaagttaaacaaacaagagaagatgaaggaggaaaagaagaagatggaggaggacaaagttttcagaagtgcttattagagctattacatgccaaatatctactctgtgggaaaagcaaatttcacatttttatcaactctgtattcctacatctgatcaagagatgttagaagccagttcttgagaatggcaggaccaccttgtggacataacctgggtcggtgaatgactgcacggagcagagtcctacctgtcaagacgtcagattatgatgtgaataagcaataaacatatattttgttaactcac

SEQ ID NO: 596 - DNA, 133 bp, Homo sapiens
  misc_feature 3, 9, 54, 61, 69, 80, 115: n = A,T,C or G
aanagtgtntggcatactatatgctaatccaacaggactgcggtcttatacgangaggaanactctctntccaccatganaagacacaatgagaaggctgccatctgcctgccanaaggagagccctcgctgg

SEQ ID NO: 597 - DNA, 397 bp, Homo sapiens
gtaaataaactttctgcctcatgactccttcccttcttccttctttttcaaatgctcaaatctgctgtagattttaacatcaagaaagaaccctcatgcttggaaacactgggaaccactggtgaagagcaagagccctgggaagaatcaggatttcacttggcctctgccactgacgtgcggcatgactgtggaccagcgacctgcacctcttgtgccccagtttactcctctgtgaaatgaacactcatgcgagatgatggctagactgtcaccaggtctcctatttgctagtacggtgccctctttgaccagcagaataaagatggataggtgttctacctacatacagtcatcaaactcatcaaactgtgagcaggaagagagaaaagactgg

SEQ ID NO: 598 - DNA, 318 bp, Homo sapiens
  misc_feature 113, 115, 123, 125, 134, 136, 138, 150, 156, 157, 162, 172,175, 185, 195, 204, 220, 235, 245, 251, 254, 261, 271, 283,285, 304, 305: n = A,T,C or G
gtaatccacatgccaaactgaatttaaaattcctggatttattgtaagacagaaaagccaaaaaaaaaatcacaaacgagaattttggatttcaaggaaatgttcgattgtanangacaggcncntggcaaaanangngagggctatgtnaagatnnaggcnaaggttgaantgntgctgccacnagccaaggancaccacganccaccacaagctgganaaggcaaagaaggantcttccctanaatctncanaggaagngtgggcctgncaccaccttgantntggacttctggccttcggnnctggcaaagaata

SEQ ID NO: 599 - DNA, 374 bp, Homo sapiens
ctgagaattcattctgaatatttgcagatacataaaactccaggtgtaactccaagcaaaacatgatgaaagagggaatttggataaaccatggaatgatgacatcacattgagcaccatctggtataaacatttttgctttctgcagtgaccagatgaaggaaatatggtgccgtgtgcttcttcagtgattaattcaggaaagcctttgctgagctgaaatccaaaataggaagaacccaccttccacatgttcaagaagcttgtgatcccagggatgacactgcccttttcctctgaaggaaagaagtttcccctgaccataatgccaaagctacaaacacttacatacctccataattttgcactgaact

SEQ ID NO: 600 - DNA, 366 bp, Homo sapiens
  misc_feature 187, 244: n = A,T,C or G
gagcttacagtccagcggaggagccaaagaagtaaaaagagatctgcaaaatgaaagtatcacaagagaggtcaactcaagatgctatttcccatcagaacagaagtcacccttgactaaaaccacaactttaaacttggcccaacatccagtgccttgtccccaggggtgcaaatatggactgganaggaccccaatttatctgccctgccctgaggtctgggctgggatatagcccaggtcncatctatcctgaggggccttccagatggacacatggacagccagttctggtcccctgacttactcctctgtagtgaaaacagactcagtaaacacaagctgaattaaactggccaattgttg

SEQ ID NO: 601 - DNA, 240 bp, Homo sapiens
  misc_feature 105: n = A,T,C or G
gtcttactgcctattagagcaaaggaagaggaaatctttggctaaccggtcagagaaaacaactggattaaacaagatactcttcatgactgtggttgcaaaaangcaacacaacttttaaaaatcttagtactaatttttaaaaatggcttttaatttgggggagactcgataacagaacccgaaaatctgatgaattgtatgaacattttgttcagaaaaataaacatatattaccag

SEQ ID NO: 602 - DNA, 411 bp, Homo sapiens
ttaattctcacagaaactcttggaggtagctgcaagagctgctagggacctcgattagagttattacatatggaccctcatgaatcagaggaagaacgaggcctggagtcatgaaggggcttaactgaagtcacaaggctcacggcaggaccagtatcaaaatagaccccaatgtgcggcaggctcatcagtggaagtgacttaccctgtctcagatgaggctttgtactgtggactttcgaggcacatgggagcctcggtgaccagggaccatgttgctattccttattgtgtaccatgccagaaggaaattttaaaatcctgaaatactctttttgatggctggaagaaaaatattgtaaattggtaatacagagaaaatctgctaatcttgtcaaggaattttggaca

SEQ ID NO: 603 - DNA, 233 bp, Homo sapiens
  misc_feature 94: n = A,T,C or G
gttcatgttgctgaggaggcagagggctgagttcttccatccatcgccttcaagtgtcaggcggcttccggttggacaagatggctaccccagngggcttgtttcctctctggtctctttttctgtctaagactcactccataccagcctgagcttgggaccattgttttgctcctctcatcctcctacccccagagctgacagatttagcaaataaaatttacaagattctg

SEQ ID NO: 604 - DNA, 256 bp, Homo sapiens
ttgtatcagctgaagagcgtagaagctgtgccatcccagccattatgagcatctctcatgcccagatcttcgtttctgaatttctctttccactagaagaaaccatgagagaaatggcgagcctgagatcctttattgcaccaaaagcaaggaagtatggaaggagagctgagggcttgccaggacattggccgacatggtctctcactggtcaaacttgggatggttggaacatcaataaagaatattaatgatc

SEQ ID NO: 605 - DNA, 290 bp, Homo sapiens
aaggctgcatttctcaggcataagctcttgccagccattcacggtgattacgggaaggttaagcattgttgggactcacaaaacagctgtgttaagcattactacctctgaacgcttcaggaggaaagccacattctcctgtggaaggaaatagttgcaggtgatacctgctcccttcaccttctgctgtgagtggaagctccctgaagctctcaccagaagcagatgctggcaccatgcttcttgtacagcttgaggaaccatgagttaaataaacctcttttctttat

SEQ ID NO: 606 - DNA, 404 bp, Homo sapiens
  misc_feature 286: n = A,T,C or G
gctgctggtctgcaagtccagggaccatacttggagtagcaagcccccagggaaggacagactttaataagaagaggatcccctatgaaaattccaacttgagctcctttgttcattcagacattcatacaaataccaactgtgggccaaacactgaagatttccagtgcctatcccagaaatctgcactcctgttcctgccaaactcctgctctgcgtcatcaggtaattcccagcaaaaggcaaagtgtctccatgagtcacttcgtcccaacgcttaaatggngttggcttcttagctatgacagggacatcacagagcacctggttgaggctgtcactctatgcaataaccagctttcggccaaatgaaagacagcaccaaagtcatcaccaactgactc

SEQ ID NO: 607 - DNA, 402 bp, Homo sapiens
  misc_feature 160: n = A,T,C or G
atgaggaaattgaaatccaaagatattgatgacagaactgctaagtgatagagtcagcacaatgcctggatggaaattcacttccagaaccacatcttcaccacaaacattgctgtcagggctctccaggttaataacctttgctggtggggttctccanaatcagctgccaaaacagagtctgagtttcaaggtacttattagggatcaagccctgtggaagacacaggggaagctgaactgtgagggcagcccacagaagcctcccctgccctgcagggagctctggagtgaatactgttctgtccaccagagctgggccccagtgggcaaacaagaccaggcctttgcacccccacctcactcaacatcaagctgtgtgggttgtcctaagaaggggtc

SEQ ID NO: 608 - DNA, 401 bp, Homo sapiens
  misc_feature 185, 272: n = A,T,C or G
gcaaaaccatcaacggatgctgacatcagcgagcaaaagtgtgatgaagaacggcgatttgcatcgtttcaaagtatctctccatgagatacttactaatttcaaaggggacaatggccaggtgaagcctggcagatgtcacttacactgagtgatccatgttgccatctccagggtgacacggngtgcctgtgacatgaagcgccaaggggaacccaatgtcatttctggggttcttcctgccccaaacagtccatttggttaaactcacnagagtgtgtgcttgtcgatgtagctgattctgtatgggtggggatttggaccaccccttcactactcaaagtggggtcttgtacaccagcagcagggttacctccttaaccccgagcttgtaagaaagc

SEQ ID NO: 609 - DNA, 242 bp, Homo sapiens
  misc_feature 189: n = A,T,C or G
ctgagatttacacggaacaaggaggtttggctatcgttacatgagagaacgttacccaaggacaaagaagtttcacagacttcccctggacccttgttggtgcccagatgtctgcggttccctgtcacttaaatataaaagacaaggcaaagctcgcataattctaagatggttctttaggacattggnctgcttcttcttggtttcctggctccccaaaataaagtcgctttccttcctcc

SEQ ID NO: 610 - DNA, 284 bp, Homo sapiens
agccgggctgattgtgtggctgcagagaaccctggtgctgaaaccctcaggacccctgggaggagagatggctgccactccaaagaacaagagccagagggggatttgagctggaacctacaaagccctcagaaggcattcgatgcctcactggaatgcccatcatttcacatgtccccagtccccacttatccccctccactcctatgacactgctggcccagcatggcgtgctacatacaggtgggaatctgtccatatcaataatccaaaccatcttttcc

SEQ ID NO: 611 - DNA, 157 bp, Homo sapiens
  misc_feature 40, 48, 89, 119, 136: n = A,T,C or G
cttagaagccttctgcttgaaaggacgctcacagcccttnttgatgtnatccagctcttatccacgaatccttcagcttgaccatgggnaatgcggactgtccccctttcgtagtggcnccagtgagacactattnttttaaaaataaaaaagagca

SEQ ID NO: 612 - DNA, 345 bp, Homo sapiens
  misc_feature 11, 87, 303, 322: n = A,T,C or G
gcattcatgcngcctcacttgctgggaaatgagttcacacatttggagtttccaaggagagtacagagaaaggagcttggaaagaanatgctctacagggactttaatatgacaggctgggcatacaaaaccattgaggatgaggacttgaagttcccccttatatatggagaaggcaagaaggcccgggtaatggcaactattggagtgaccaggggacttggggaccatgacctgaaggtgcatgactccaacatctacattaaaccattcctgtcttcagcttcagaagtaccgcatgangtttttgtttatattttgngcaataaaaacattttcagcggt

SEQ ID NO: 613 - DNA, 429 bp, Homo sapiens
aaggtgactacttggaacgttgacttgagaatttagaagccgaatcaatgctccacggagaagcatgctgggattgatttgtgatgtctgccacgaatataagattggccatttggggcatgaatgctattcatggattggatctcctaagagcccgaatttctgagaaaccactgaagacctgaccccagcgcttaattatttctcctttccaagcatctctcatggaaggcatcttggatgaaaagacctttggcagcgtgggttttgcaggttgctggagagccagtgggattgcatcttttgcagaggacaggtccttaagggcaaaatcgcttaagagtcaaaatggccttgaaaattccttgggaagccgtcatgttggagccaaccactatttctcaataatttcagcacaagccagttttt

SEQ ID NO: 614 - DNA, 418 bp, Homo sapiens
  misc_feature 384: n = A,T,C or G
cacactacaagggtctcacagaaaacacttgatggaatcttactagactaactgtatatattcctgagcacactccaagacctgggagaggcagaaagaaagaagaaatgcaagtctacaatatgagatacaaagtttgaatttactgggaaagcaaagagaacacatccgaacaaaataagaagaagaaatggtgtgagtattgttgcattgcgaatggaatggagaacaatgaaatgagggctagaagccaaaccgagggtgaagatggtcaaaatgaggaagataatttatctttaatcaaaaatataataatcaccagaataataataaccataagaggtcaggaacagaagaagggtgaaaacagagtcaacctcaaangcaaacctagtaccacagaaccagggatggacaa

SEQ ID NO: 615 - DNA, 362 bp, Homo sapiens
  misc_feature 254: n = A,T,C or G
tttttcaaagacaaagatgaaataaagacattacaaaacatatagaagctgcaaaaatgtatcaccagaagaccagcattaaaagaaatgttaaagttcttcaggcagaagaaaaatgaaaccagatagaaaaacgtatctacacaaagaagaagagcatcggatttgtagtcactccaatgcttcctcatcaggaacctagaaagctgctaagaatccatctcacccagcatcaaattccacagccctaatgnatccagatatactcagaaatctacaagtcatgtcaacttctatgtctttcacttgccccaaactctgtgccaggtaccatgggagatgaaataaacatttcaaacatc

SEQ ID NO: 616 - DNA, 195 bp, Homo sapiens
cctactcacaagaagatggcaaagatgaagacttttatgatgatccacttccacttaatgaacagctgaagccccttcaccttctgccatgagtggaagcagcctgaggacctcaccaaaggcagattctggtgccatgctccttgtccaatctgcagaactatgagccaaataaaccatttttctttataaatt

SEQ ID NO: 617 - DNA, 170 bp, Homo sapiens
gagctgaacactgccccgagaatgcaacagaacttcagctctgtcccagggtcgtcagccacagctccaagtttcttagcatcagctttttctgaacaaaatagtgcatcctgctggaatcactactgtaaactgagtataaaggaaaataaaccctctttttcttatcc

SEQ ID NO: 618 - DNA, 98 bp, Homo sapiens
  misc_feature 9, 18, 30, 47, 51, 59: n = A,T,C or G
atgcagcantaagatgcnatcttggaagcncaagacggacctctctntcgngagacatnaaacctgccagcaccttgatcttggactttcagcctcca

SEQ ID NO: 619 - DNA, 270 bp, Homo sapiens
gaaaatctctcacaaagaagtcatctcctagccactgtgatatttgccacatgggatttgagatttcagatgaagtccctatgccccgtgctggctggggagtgtggactatgagcatgagagagagctgccttctctgggaacaagaactgttggctcatcccatagggtctggtctggggtctggcacagcgctttcctcatagtgatgttcaagaaatgtttgctaaatgaataaatgagaagatggatacagacttattaaaatgc

SEQ ID NO: 620 - DNA, 418 bp, Homo sapiens
gttgttcccatattttccataagagagacatgtgtcggcttaaaagaaatgaaactacaatggtgtgagggaggaatctcgtgattgttagcgtatattttctgcattctacctgaaattgtcaacgaagtgtaggacccaggtcagtgcctgtctcatagtaggtacctaactaactacttgaaagaatgaacatcactatgaggaaagtacaccatagtgaccattttacagatgaggaaatggaggcacagagaatgagatgttgtaatgtgcacagttggagagaccactttctggcactcggatatgcaatataattttgaaaaattaaactacatgctcgaggaaggattcaacattttccggagaaccccagcattttccctcagaagactaaaattagatcctgttttaa

SEQ ID NO: 621 - DNA, 423 bp, Homo sapiens
cccttggtacctgcctctttggaaggcacctccggtcacatcaggagcatggatggggccccacctgcatacacatggagatggactcatcctccagctactttggataccgtggctcccatttttctactttctctgaaggattgaagccaccttgcccagaagtcaccgggagttatgcctcctccctaaggatggcccacagccagtgcctcatcggagcaagaggtacagaagccctgctccctcatctgaagatggggcaggctccgcagtgcaatccatgcacccgagctcccatggcatcagactgacattgctggaagccacagtcttcctcagcttctccttccctgtcctgcttccctcactcccttatggttttctcctgagggcactcccttaataaatcacttgcgtcaa

SEQ ID NO: 622 - DNA, 205 bp, Homo sapiens
gtttttcctccaagtcttgactgagactgagtctacatgacaccaaaacacccaaacgaaaaagaaaaattcacttgaaccacttagatgtttcttcaccaaatccagatgtttggcagtgcagataatacttctggataatgagtgactccccctacaatcaacactttcatcacactgctttaattaaaaaaatagttcccat

SEQ ID NO: 623 - DNA, 418 bp, Homo sapiens
  misc_feature 361, 378, 397: n = A,T,C or G
aaagaaaaacctatggaaagatcctgtgctggaagaaagcatgaagtaattcaaatgactaaaaggtcttaaacatctttgccatcatttataatgcagacttcatgctgagaagagcactcgacactgccaccgaagttctgtttctggtgttgttttgtcaattatgctgatgccacgggaccatggaacagtgccactatttccaagagcaacagcaaatcgaaaaatcttcatgcaatggttgttctagaaaagtctattacattggtttatgctttaaatatagttaccaccagagtagtaattttccaatctatcctttaaaagttcaagtgtattattgcattttttaagttgnaaaaagaatggatggtncacatatccttaacatagnatataaaagcactactcaata

SEQ ID NO: 624 - DNA, 156 bp, Homo sapiens
aaacaatatctgctcttggagtcactgccaccaagggaataactttacctggaatatggactgggagctcaagccaaaagcatggacaagggagtcccagattacaggatactattatgacttttgcataaatataaactcctattagataaattg

SEQ ID NO: 625 - DNA, 423 bp, Homo sapiens
gcgtgaaagacgctgaacaaatccctgtcagctgcacaggtgtctttgtaacacattgccagttagcgtgacaatgcacgggaagcagctatgctccaggttgtgctccagctgctcagcattgaccctgccccatgccctctgaagaagcagctttgccgaaagtggagggccagcaaagaaggaaactgaaagcaggtgtccaggtgatgaaattggcacagaacaccaaaggatggagctgagattcatgcctgggctgcctccccacaatcccctcacgttgaatccaaccctgacttttgtgtcccaccgaggaaagaagaaagccacccaccccagtgaccatggcctctaactgctctctctgcctgtggaaagccagtggattgggctaggatacaaatgccctccatcgatttt

SEQ ID NO: 626 - DNA, 263 bp, Homo sapiens
gttaacacacactaaagggcaatgccattaaaggagaagaggaactttggaaactgctgtctgaaaggaaagcaaagcactcttcattaacagctagtgggctcctaatttctgcccatgaaggcatgttcatactgacagagcaccccctcaaggggaagaaccatccgcgctaattcttgttgtcctcttctgagctagtgtgctcattgttcatacaaactagtgtgtcaacattaaaacaaaaagggagttgaatcaat

SEQ ID NO: 627 - DNA, 411 bp, Homo sapiens
  misc_feature 329, 341, 344, 365, 389, 392: n = A,T,C or G
taatacacaatattggcaacaatgcaacaaaatggacacactctactctccagcgggagtttcagaaatatgccataatggaacaagataactaaaagaagaaaactacctcaaggttaaaaaaacgaaaagaagagaaagaaaaaaggaaagaagcagaaggaagaactctgctgcagtactggaagcaggcagattatttaaattacggtggtgccatggaacaagagaaggcagatgaagagcgacacccttcaagttaacacaggaacaattaacaatagaatccttaagatgcaaaactccttgctgtttaccagcaccagaanagaggaagaagnggntctgggggaattgcgtgccantctgcggcaggttggctggaaaancanccctggttggagctttgga

SEQ ID NO: 628 - DNA, 121 bp, Homo sapiens
aattgtatatttccacatatgctggacaataggcagaaagtggagacccaaagaacttgtgatatgacggacatgagaagcttcagttggcctcaaatgtcaaataatatccttcctgaat

SEQ ID NO: 629 - DNA, 196 bp, Homo sapiens
gattagaggccttctaaaaagagttgcttcggagctcactgtctttcagccatgggagaatatagcaggaaggaagcagtcttcaagcaaagaaaagtgctcgtgaaagaagagctgaaccctgctagaatattgatcttggactttccagcctccagaactgtgagaaaataaatttatgttgtttaaaccatgt

SEQ ID NO: 630 - DNA, 161 bp, Homo sapiens
gagcagatactcagctgagaaaagtacgaaaacagatctgcaaggacatgcagtggaatgtgagtggtttggctgggaagctcacaatgaagaacaaattgcaccacagaatggctggaaaagttaattaaagcaacctcaccaataactcagccagtaac

SEQ ID NO: 631 - DNA, 444 bp, Homo sapiens
  misc_feature 2, 231, 270, 287, 325, 327, 334, 338: n = A,T,C or G
cnaactgagattttacacaatgttgtcaaactgtgctggaagatgacctttcccaagaatggggatgattcattcttctgggaggaaaagtcctattggcaaaggattcttcttcccttgtatacatgtgtcactgaagatcagaacctgcactctacgcaacaaagcaacagatgaatttttacagtgctataagttttaagcatataggaaagaaagtggaacagtggncagagtcttgggtttggcctcagcaaaatggtgcttaanagtgacagccttggtgntaacagataattttcaaaactcacaaaaccatcaaatnangaatccnttgngtgccatttctcatccattggcaatggatcaggcaactgttagctattctaagtgaaattttgtgaaatttcaaattcagtgcttttttaaccaatattaaaagtg

SEQ ID NO: 632 - DNA, 421 bp, Homo sapiens
  misc_feature 11, 19, 22, 36, 37, 39, 41, 44, 48, 64, 75, 79, 82, 93, 97,104, 150, 177, 386, 404: n = A,T,C or G
gtggggtcttncatgaganacnctaaagcctcctgnnananctnccanaattgtcaggattctncaagatgatgnggcnganggtatttgaanacantgagttnggagggggcacacagctggagaaagctcaaatgtcctgatgccaanaagttcattcatggaccatccaccctnctgtccacacacccagtggacggagacagctgccctctgctaaggatttccgcatgggggagagcctggctgctgtcgagcagtccccttcctcccacctcttccaactaggctcttgagaatgtcagctaccacacagccacagctaccacacacctgcttgaagaggagacaccaggacacccatcaaaagccagaactggcatctnccctgtgggaagttcttncttgtttaacctcaatc

SEQ ID NO: 633 - DNA, 246 bp, Homo sapiens
aaactgaggctctcccctagactgtgagcagcaaaaggaaaacaaccccacctgccttgattcagatgttctcctatcaccagcacagtgcccagcacgtgggaggtattcaactgctgctaactgttgaacaaaccagccgggtcatctgcaaaatgactgtcctggactcctcaaaaatgtcaactcatgggagaaaaaaaggctggggaatcattcttgattaaagcacaccaaagagacatg

SEQ ID NO: 634 - DNA, 165 bp, Homo sapiens
attggactactagagtgaagcaaattgccaaattgtggagaaaagcaagctcacaagaaagagcaccatatgtggtattttaagaaactcctatcttttaaatatttaaatacagtgcttgaaccttatttgtattaggttaataaaaaaacaaatttccatttc

SEQ ID NO: 635 - DNA, 323 bp, Homo sapiens
  misc_feature 299: n = A,T,C or G
aatgtttacacttggagtccagagctgccctgttaagaagctcaactaccctgaggtcaccatgatgtcaggaagccaaactcgatggaaaggccattaagtgggtactgcacttgacagcccagtgtcattcccagcaaacagtcaacaccaacagtgggagagttgtcttgaatgtctacaccagtctaatcttcagaggacagcagctccgtgacatctgactccaactgcttgagagatcttatgccagaaatacccagccaagctcttcccacattcctagccccaaagaattnttagcaaaataaaacagttgtttt

SEQ ID NO: 636 - DNA, 105 bp, Homo sapiens
  misc_feature 12, 19, 20, 25, 26, 39: n = A,T,C or G
aattcctgtctngagcatnngcttnnaccttgtgtaccnagtcactctgttgctgctgtcggtacagatcgcttccccaaggaaataaattacatttcattctct

SEQ ID NO: 637 - DNA, 414 bp, Homo sapiens
gaatgaagataaaatcaagacatcttcagatgaaggaaaactaagacaatttgtcatcaacagaccgactctaaaagaatgttcttccaacataaatgaaatgaattaagaaggaaattgtaacattaagaatgaagagataactatgaaaagagccaaaaaatggatcactaaaacaaactatctttcttcttctgagttttctaaattatattgagacagttcaagaaaaattacattgtctgatgtggttctcaatgtaagtagaggaaatatttaagcaacaatgatataaagaagagtgggtaaagggacctatatccagataagtcttctactctttacttgaagtgggaaaatgcccctagcagagtgtgatcaaaatataaatcagattatatcactttcttgatc

SEQ ID NO: 638 - DNA, 386 bp, Homo sapiens
  misc_feature 321: n = A,T,C or G
aaataagtatggatggagagaggggattatagcagagcgaatagtgttgaagtcttggtggggacattccgatttaataactttggagacagaggatgtgttccagctcacagactttcaggaataatactggaaattgacatctaatcagcattttatgcactataattgtgtaaacttttaggcctgctgtacaataatccttccctgctgtgtggtgagcactttggggccctctggatgctagatgtgatatgaatgggaagcattattattatttatgccttataatatgtcaactctatgtcctctgccacaacngacacttatttcaaatgtgcagtaacagcccccaagtgatgtattggcaaaatatttttgaaacc

SEQ ID NO: 639 - DNA, 185 bp, Homo sapiens
gacatcaagggctccagacattgagaaattttccctttaagttgcgatgggaatccagaaaacgccatatggacccctctatgctgtgaaatacttcagtactcaggagaagtcacgttctggttgctgcaagcgtgtgataccctgtcattaaaataagaaatagattgttatcctctgccaag

SEQ ID NO: 640 - DNA, 93 bp, Homo sapiens
  misc_feature 3, 5, 11, 12, 13, 25, 26, 27, 31: n = A,T,C or G
cananctgttnnntcaaatctgatnnnggcncactgaccctgaaaaatggctgagctaaaataaaagctgtgtttataacgctgaaacgaaat

SEQ ID NO: 641 - DNA, 267 bp, Homo sapiens
  misc_feature 248: n = A,T,C or G
gcctcacttgtcctctcagctatcaagataactgttgggtatgaaaactgaactctgtcttagagggtttctttttccagaagatgcatgtttggaattctgcaagaactcctgatcactttaaaatcccaatgcctttattttcaagatgtacagtttctgtcttttatcaaatagaggagcaaaatctattcttccaaaaaaaggaaaaatgcacaatatccaaataaattttccccagctgcttnctggatattggaattagat

SEQ ID NO: 642 - DNA, 324 bp, Homo sapiens
  misc_feature 274: n = A,T,C or G
gcccacatagaaaagctgtcattggcctccgggtcaggcaagagatgggaggtgttcagagcagcaaaccctacaagatgttggaggccattcacaagcaagcgcctgcttggaaaataacgtgggataagaacaatgaaataatttgatgaggaaagtgttgtgctacattgaatactcacgtcacaaaatgtgcttctacattatgtaacttacatggtcaaatgactggtacattttattcctgtgctaatttgtcaattctgttccaagnggaaagagtctaacatgacttttcaaaaacaaaacaagacaaaacaaaac

SEQ ID NO: 643 - DNA, 311 bp, Homo sapiens
agacgaggggcctcgctatcttgtccaggcgcgtctcaaactcctggcctcaagccatcctgctctccagcctcccaagtagctggaattacagaaattgaagaatcagttccagagagatctcctggagggcctaggatcacagagcaaagcagaaaccacagctgtctcggaggacgaaactccagctcttcacccagagatagtcgtgggctggtggcttcagggcccactagggcctttgttatgagttttctcttcccagcggtccttttattgcataatcaataaaccactgacagaaataaaag

SEQ ID NO: 644 - DNA, 398 bp, Homo sapiens
gataccttgactccaactcagtgactacaaagaactgcaaacaggtgtgaaaacaagcaataggtcatctctggcattacctgggaattcaagttcagccctgcattctccctctgggcaattctggtagagaccatgaggcaacccctgggaggagcagtagccataacaggatccccccacagcaaccccagggctaagaccagtgggtgcaaaacaccttctttatcaggtgacgccatcgcctcaactcctgcagtggtcaatatggtcaatattaagttcacaaacatgggaacttcctgacatcatcacagaaggaatgaaaatgcagttggggtggctggtacattttaaaataaggctggttctcctgggagggaaaaggggtttttttt

SEQ ID NO: 645 - DNA, 281 bp, Homo sapiens
atcatttactccagggaagaccagctgccatgtcacgtgtagtcttatgcagatgactacatgataaggaactacagcctcctgccaacagccatttacaggtaatagaagggagccagaagcagttcttcattgctacaccagacccagaataagggtagactcttgtgatcatcctccctttctcaagagctggagaccagatcctactgaagagtccaggctctaccatgtatgaacaagggtaactttggaaaaattattaaaactttccaggcctc

SEQ ID NO: 646 - DNA, 364 bp, Homo sapiens
gtttgcagagaaccagcagcctgacaaccagccatctctcctcttgataccagtgttcaagcaggctgaaggtcagaatcttggcagtttgtttcctagaatatacaacatcagactgtgcttcctaaaagtccaggagagttcttctacgagaagattggaacttgatagagcagaagatcagctgaacgctggaagactctccagtgtgaaatgtttatttctaggatcttctgttcaaccttggagccttcagagtcctatgtatagtcttaaactgctgatctaaaaatggtgctctgtttcagcaggtaattaatgatgttacacattttaataaaatttttcagctagatcgctacct

SEQ ID NO: 647 - DNA, 403 bp, Homo sapiens
gacacacagccctcctgaagaaataactcacaatcttcctgtgcccggctattgccagacccttggctgataggagaatggatgttagctgactgcaaccttggcgttatcagtactgcctgtggccctctccagcacacagcacaggcgccgtcctataacatccccagcaagccctcatttctttgcagtggctcctcccttgctgacctgccccttgcttcggctcctcccttgctgacctgccccttgcttcggctcctcccttgctgacctgccccttgcttcggctcctcccttgctgacctgccccttgcttcggctcctcccttgctgacctgcccgttgcttctgtgctatgcacatttcctactttctctaataaatctgcctttctttaccg

SEQ ID NO: 648 - DNA, 428 bp, Homo sapiens
gttgctatgacagccaggaatttgcgaaccaaaccagacctggagaagaagtctctccttggcccaaagagtttgcagttccaagtggttctgctcatggttcctgttgtcttctttgacacctgccagatggaagaacctctaaacctgggatttggaaatgtcccaacagaaaggctatttccaagctggctgaagcttggaaataaattcgacggaatttaggtgtgatagaaggaacttcttggcaagaaaagctggaaaatattacaataggtcccagagagaacctcattatcttctcgaaaaaatttctatatttgtttagtgttctgtggtttgctaagcacattcacataaattatctaattggatcttcacatccgcctggtgaaggagtaaagataggtttcataatatttgaccaa

SEQ ID NO: 649 - DNA, 26 bp, Homo sapiens
tgagtggaagcagcctgaggacctca

SEQ ID NO: 650 - DNA, 161 bp, Homo sapiens
ccctgctacatcctccttcaagatagaaagaagaaaccctaaacacagagaatgcaagaagcagaagagggccccatctttacagcgatcagctagcagagtcaaaaagcctgtgtggagttttcaacaaagcagaggtgcaattttccttggaaaaaaaa

SEQ ID NO: 651 - DNA, 295 bp, Homo sapiens
gcacatctggataaaggcagaaacaaagtaacaagggaggaagtcccagtaaaccaatcttttttctcccaaacacatattttggggctgacatcatagccacatggcacaaactacagatggaaaagtatctgaactcaaatccggaaacttaacctttatcagatgaagacaagaaagacttcagcaggcaaactcacacctgttgggctgaggagctagaaatcaacaaccaaataccaacattactgctctggaaataacttctgttagaacaataaagtaagatgagggc

SEQ ID NO: 652 - DNA, 409 bp, Homo sapiens
  misc_feature 379, 381: n = A,T,C or G
atctctcttaccgggggatgcaccaaagcccagctgttcagtgtcaatggctgccagctcccaactacatcccacacagacgggagccacctcaatgtctgcgagatttcctgtccctccttttcaatcccatcaaggcaccctctaccaatgactgatggatacagggatacaaaagcccagacacctatcttccaagaggaaaaaactctgtggtggtgccatttatgttccagagcaactgcgggatcaagctgagggtggactccagctgaaaccacatgcaacagactgaatgcttgtgccctcccaaaattaatatgttgaagctctaatcccaatgtgatgatggtattagggaggtaattgggtcataaangnggatcccctgttaatgggattgcactta

SEQ ID NO: 653 - DNA, 309 bp, Homo sapiens
  misc_feature 81, 196: n = A,T,C or G
gctcatagatggaaggaacttgccttgagtccccagtaagacactggattttggacctttgaatcaacgatggaaagtttnctgaggcctccccagaagcagaaaccgctatgcttcccttacagcctgcagagccgtaaatgagagaaaatgcaactggaaaactggcttccattctaagatatttaagcaaganaaataatcatagtctacataatcacagaatagcttggaagaagatgctactgagtatgttacacaggagcttgtgatcaaatgtaaataaacaggtaacatggacttgggaaa

SEQ ID NO: 654 - DNA, 434 bp, Homo sapiens
atgtctcaaggaagtggatgccaggaatgatgaatcactgaagcctgttgggggatccacactcgaggcacagatcatacaatctttgagagtaaaaggatggatcaagaccacaggaaagaagggatgaagctgtggagagtgaggatgaggaacattgcagatgactggaggccagctccctgaccttcccctactgccactgctgcaggccctggtcaggggaagtaaaactgacactagctgtttatcatgctttaagaccagaaagtaaaatgaaaaccattaccacctctcaggatgcaagaaggcacaagaaaggactaaaccagttgaagatgttatctcaatggaagaaggaatcctaattaaattgaagtcttaacaaaaagacggtctatttcacaagactgatagagacatatacttgatga

SEQ ID NO: 655 - DNA, 407 bp, Homo sapiens
  misc_feature 6, 101, 218, 267, 354, 385: n = A,T,C or G
caccangataactgatccaagtcacaagcaaacactcaacggaggatgagcatccatccagccacctgtctttgcctgctttggaggtgacgcctggcttntcccagcagcgctgatggatctgatggtgatttcataccaggttgcagcctttagtcccgtcacagtgcctggggaattggccaccgtggtttcaatgactgtgtccccgtcttcanccgtgaggaggtaactggtggcacccggcactgtagcccattctacagngatactgttgctgagttttgaatatgcctgatcaatagtgggtatttcaggagctgaaagaggttttagagttgtacattaaccaanatacctacgaggatgacttctttcatcattntactcttcaagctaaatctata

SEQ ID NO: 656 - DNA, 234 bp, Homo sapiens
  misc_feature 5: n = A,T,C or G
gtccngggagactttcatcttcaaactttgagagagagctgagaagcctcggaaccgtcgcccccgtgcccccaacccacctcccggatccgcgaaacctacaaaactggatcaccagccgtctcacgccactactgcctgtgccaagaatcccaaactctactgatttcaagcctgtcttttttccaaagaaaaaagtcttatctaaccaataaacaagctgctttccctagc

SEQ ID NO: 657 - DNA, 422 bp, Homo sapiens
  misc_feature 4, 18, 21: n = A,T,C or G
cacnacctgcattaagtnacnaactgaggttgatcccaggagaaaacattctactcctcagcatgggtcttgcctgattcatttaccaactatgacactctcacccagaggcataccaagaaaggaacttgagaaaaccattccagttaaagcaagttgacccggcacagtccaaaatccgtgctatgcagcacagtccaaaatccgtgctatgcagcacagtccaaaatccgtgctacccagcacagtccaaaatccgtgcagagctcgtggcacagaggaaaatggacataaggtagcggtaacaggctggcgactgtggcttttacacattgcttcacacaaccctgtccaggagctttacacactcactaaacaaacagaagacaccatccaattcactggagccccgttggataaat

SEQ ID NO: 658 - DNA, 333 bp, Homo sapiens
acgctgtgcttggtcctacctaaaatacaaaatcaagaccacccaggccctgctctaaggaagtcactctctagaaagggacagagacatgctatcaggaagaaaactgaatatccttacattgtgaggtcagatgtatggctttcattctgaatgcagtaacttcaaatgtagacacgtgaacagaaagctttgtaacagaaaaacagcattgtttcgttagatgactatagatagtatttcataaaatacaagaaaaacactcaaaattagctccaaaaaatgtatgaaaggtgatactctgatatttaataaaactgaacctctcacaac

SEQ ID NO: 659 - DNA, 411 bp, Homo sapiens
  misc_feature 256, 291, 359, 368: n = A,T,C or G
ggacaattgcctttgaatgaagaatgacagagctctggtcttcgctgacccttgcaactcctgcagcgtaatccatggcaactcgttactacggcaaccaaggaacatgcaccagaccaggataaaaccgtgaaatctgatgtcatattttcataagacataattgcaaatgatattctaaagcagatttgttaaacgtgtgatctaaattataagttaagttggaagtgattatgaaaccttcattgggactaanaattaagggtctgtgttcatgcactcagtgattgngttcatgcactcagtgattttattgagcacctactatgtgtggcacacggagatgaataagacatagnttctcatgnctattcttcccctcagcccccctcacctcttgaacagacataa

SEQ ID NO: 660 - DNA, 398 bp, Homo sapiens
tcagaaaaaaagtaaccaactggcccaaacagcatgaaagaacaccaggcaaaaaatagaagaaatataccgtatcatcaaaaggtgcgtctgagttgaagtctctgttgaaaaactgcttattagcctgaagaatctagcagggtcatcagaagacttttcacacccagttggttcagctgtctcagatgattgtactgccaagaagctcctgtgattcccagcttggtcccctttgtagaaggccacgtcttcttaacctaggaataaatgaaactgaacagatgcctatacccccttgtgatatttttctgtgacacttaacatactttgaaaagaccagggaaatgttcctatcaaagaataacagatatatccacctgaagcgtatcggcata

SEQ ID NO: 661 - DNA, 211 bp, Homo sapiens
  misc_feature 176, 185, 192, 193: n = A,T,C or G
caaactactgctttgtccatgaacaccttgtcaacttcaaagattcacttctgttggaaataaacagcatgagcagaaggctgccaagttacagaaaatttgaagattcttgaagattctttgatgacaacaagcttggcagggtggcttcttgatgttgaagtgctgaaaaggcngattttaangggtttnnaatggaaaagggggggag

SEQ ID NO: 662 - DNA, 86 bp, Homo sapiens
  misc_feature 5, 16, 43, 45, 58, 62: n = A,T,C or G
ataanaaaaccaggtntgcggggaaattgagacttgaactcangnctggcggactgcnaagntgacacctgtctgctacaagcaag

SEQ ID NO: 663 - DNA, 320 bp, Homo sapiens
  misc_feature 285: n = A,T,C or G
ccattgtctgggagttttggaaccactgactgactcttcgagcaccaggcttttcccttggtcctcagcactgggtggggagccctacatcccagaagtcttgggaaacagggtggagcggaatcgcctatcacagccaaacaagactctccaggaggaaatacagcagagacctgctcagggcttagcaaacagtgacaaaggtgaggtgaagccagtctggacgcacaccagttcgggatgatctgaggaatgtcaggcagtccctatatcctcagatgtgtncccatccacctggcacatgtctggaacttcccatt

SEQ ID NO: 664 - DNA, 386 bp, Homo sapiens
gacacacacacgaaggttccatctatgaggaatggaccctttccaaacactgaatctgctgatgtcttgatcttggacttcccagccttcagaactggaaacagccatgacaaaatagaggatgaaaatgttcaaaagaaggggataactgatgagggacaaaagaattccactggaaatggcaactacagctggaagagtgaagatctgattaaggaagggctggaccatcagcgttcctggcattgctttcaccccaacaggacttgacctccagtatctcttttctattcatcctgtaccagctgctgtctatatgggctgaaattgtgtctggttttgctcatcatcttatagcatatagcaggagtgtaataaacaattgc

SEQ ID NO: 665 - DNA, 249 bp, Homo sapiens
gccttaggttccagagccttaccaggatgagagggctgatggtgacagtggcagtgaccggaagctgggagcccttcccaaagcccctggagggaactcaccactagcacgaaccgccaaggccctgggtgccagcctagtgcccgccctaggagactgacatggaaggcttctggcttcagtcaaatgccatctcactcatttgcctctcctttctttcttttccagaattaaagctcataggatgat

SEQ ID NO: 666 - DNA, 278 bp, Homo sapiens
  misc_feature 34, 104, 181, 210: n = A,T,C or G
cttatatactttgatgaatcaagctgtcatttanagagcctcgtgggaaggactgagagaggtgtctagccaacagccactgggcaactgaatcctaccaacanccatgtaaatgggctgggaagcaaatctttctcaggcttgagatgaccacagccccggtcggcaccttgattatagnctgtgaagtccctgaaagcagaaccagcntaagtcagcccagattcccaacccacagaaactctgaggtaataaatgtttaaagccactaaaaaacc

SEQ ID NO: 667 - DNA, 620 bp, Homo sapiens
  misc_feature 36, 47, 55, 69, 72, 87, 98, 100, 103, 109, 114, 115, 119,123, 126, 135, 137, 152, 164, 189, 204, 224, 238, 261, 284,291, 309, 334, 337, 365, 391, 474, 482, 493, 511, 537, 545,562, 570, 590, 594, 595: n = A,T,C or G
gactccactgaaatgcgctgactgcaagagtctatngagggatgggnaatgtganccatgagggacacnagncactctggatggcgngcttgcccggntnccntgaacncttanngganggcnggntgtggttcnanaggatgtgggctttnccccttacaaanggatagaagtgggagtttgcctggncccccgacccagcanggacttttacaaggggaccntgaatgcttggganaaactaatggcgaaaccctgggncctcacttaagggctttttttgnttgcccnaaaccaacacttgatctnccttatttgggagccaagggagaanganccccggggggcccttgaatttttgcaanggtgggcttaaacaaaaaacgtgggncccaaaacccaacctgttgccccaaggcctgggaaatggccaaatggggcttcgaatctttggggttaaattaaaaaaccctnttgttttntttgggggttnaaaaacaaattttttttntggcctttaaaaccccttttggtttnaacaaaantttttattttgggccanttttaaanccccccaaaaaaaaaacctngggnntttttggggggaaaaaaacctttgg

SEQ ID NO: 668 - DNA, 412 bp, Homo sapiens
  misc_feature 366, 367, 382, 387, 389, 394: n = A,T,C or G
aagcagtgtcacgagcaaatcgcagaccagaagagacacttgtgggaaacatctagtgactcagtgattgcagagatagcaaggaggaggaatgatgggtcaggcttcctccagtcccccatcagaatccatgggacaagcaaaggattccataaaggcagctgagagccactgggggcttcctgttcaaaagctggaaaaagttaatcagacccagccagaagacactagtggccagcaaaaacctcatcctgggggagcggttaaagacagggcttctaagcaggagccccgtctgtagctgtgagtcagcatcaccatgtccaaaacaaagtccacgagtgggccaaaccccacaaaaacccnnggacttggggttttntgganantttanccccccggggaaggtttt

SEQ ID NO: 669 - DNA, 257 bp, Homo sapiens
  misc_feature 75, 77, 90, 104, 112, 135: n = A,T,C or G
cgtcgaactgagatcacaagaccctggttccagagcggtcctgctttacacccgaggggaaaagggaatggtccntncagaaagggccanaagaatctggagangaaggccnatcacctttggcccggtgggtgnccattctttattggacctaagccttaaaaatagaccaggttcccctgggtctttgggtcttcatttttgaagactcctgtcatggtaaaacctttggattaaaataaatggtatcatgcatt

SEQ ID NO: 670 - DNA, 497 bp, Homo sapiens
  misc_feature 15, 17, 19, 24, 355, 382, 402, 425, 429, 432, 439, 459, 481: n = A,T,C or G
ttcgtccactgagtnantncgcancaagaacagcaggcaaaaggaaaggcaccaagtgtaaaggaagaatatttgaagcagaacagaaaataatttctgagcaaaaagggctatgtgatgatgcttcattcagctggtgatccattacacctgttaagaggccaaagagaactgtagatctctgaggtccatgggggcaggggcaagggaataagatgaagggaacactagaataaatgaagtgccttaacagctgaaaaggctgatggatgtgctttgcacctcagaagacggaactcccagcaggagaataaagagtgcaacaagagcagagcctgctagaacccacacagtnagggaactgatcctctaataacctctnctttcagaactttataatgngctattaaaaaccccttgtttgngggntanaaaaccngggctttaccccccttaaanggggttttttggcctttggccnaaatccccaattgggg

SEQ ID NO: 671 - DNA, 257 bp, Homo sapiens
gaactgagagacgagacctatgttacccaggctgtatgtgaattcctggactcaagcaatcctcccatctcagcctcgtccctggaactcccctccaggtgccccaggacctgagagagaggtggagtgaagggggagagaaaacaaagcccagggactcgcccccaaaaaacacaatcaagaagatgctcccagcttttcaatttcagacactgagctcctcgcaagattttgttggaaggaaagcttctacagtt

SEQ ID NO: 672 - DNA, 254 bp, Homo sapiens
  misc_feature 5, 7, 8, 12, 13, 18, 19, 20, 21, 39, 52, 66, 90, 130: n = A,T,C or G
agacnanncctnnggctnnnnggtggcttcggattccangagggcgcccaanaacggattaactgncagcttcctggagcacaagcttgntattagcgcctatatccttggtcaagcaaaagtggctctncaccaacttaatggtctttttaccaccccattttctggacgaacgtaatcacaagtaagaaccaagaagtgtgcaagtccccgaatcccaagtgcttcataaataaaagaatcccagaagcttc

SEQ ID NO: 673 - DNA, 306 bp, Homo sapiens
  misc_feature 220: n = A,T,C or G
ctccactttccagcctcccttgaccttcagttggagccatttggctggagtatgaccaatggagtatatatagaggtgctgctggactgggacacatgaccagatgcaccatctcttttcccttctggtggcaccacagaggcccgcaccattaccagaagcataaccatgaagggaagcaccagaaagcctgaatcggttgcttggaagggagaaactnccagggggcccaaaataacccagaaaaatcttaccttggattttgcttaaaataagaaagtaaaatcttttattggtgttaaatcc

SEQ ID NO: 674 - DNA, 125 bp, Homo sapiens
gtagactgagatgatagtaacacgaaaggaaaattcctaaccagtgcgcaagaaagaagaaaatcaaccatgcataacactgattttagataatatcttatccataaaccaacagagaaaatgcc

SEQ ID NO: 675 - DNA, 288 bp, Homo sapiens
agaactgagacaagagtaaaaaaatagtggtacacgagatttggatatcaaaaaggttctgcagttaagctgatcagttccagcaagatggaagatcaacctcaccattcatgaaaagaaaacaatggctttaagtcaccaccaccaccaccatgaagacaaagccaaggacagaaaaggggtgaccggccttcgctcaggagtttgtcaaaagagttaaaagttggtcattttgttttattgcctattttatttctccccgactttaagaatgggtcctaagcttgc

SEQ ID NO: 676 - DNA, 343 bp, Homo sapiens
  misc_feature 6, 31, 39, 45, 49, 55, 63, 71, 83, 94, 109, 115, 118, 167,192, 212, 214, 216, 217, 218, 237, 256, 268, 293, 303, 329: n = A,T,C or G
agtctnattgatgtgcagcaaagcacaccanactccgtncttggntggnattagnttgacacncaccccanaccaggtattcnggcttcaaccnagggtctggacattnccaccntanggaaccaggaataaacaagtaaggaaaaaacttcactttcgaacccttntaatggacttcccattttcccaaanttggccaaatcaagcacttncncnnntttaccaaaggcccccttnccccggacaagaattaatntttaaaaaaacntcttgatccccaaaatgtttcgggngaggacaaangtttggaagtaacaaataaaaaattnccaggtctccttgc

SEQ ID NO: 677 - DNA, 94 bp, Homo sapiens
tagtcctgcattagtagactgagtgccattaaagatccaaagtcatgactgactccaagtatttcacaacccaataaaaaagggaaaatatttg

SEQ ID NO: 678 - DNA, 456 bp, Homo sapiens
  misc_feature 34, 386, 437: n = A,T,C or G
gactctggggagctcctgcattaagtcagagggngagatgaagaaactggggctctgaatggcatattaacgcgtgcagctccagacagcgaggaagtgatggcaactctatccgaactcaaatctgccagacctataccagtaggtgcctgtgtgcagttggggactcacctctgccattgctggcatgagctagctgtcttgaactgaaaacagacactcaaagatgggctgtgggatcccagagaggtggcagaatggtcaaagctatgaagccaacagctgctgccaagaagaaagtcctgagccctgagtgattgtaatttaaaaaacttaatgctgggagtgggtgtttattttggaggagtgggctgcttatttttggnttggggacttgttcattcatcttttctcacggcgcctactgctgccctggnccgaagttaaagctcaatg

SEQ ID NO: 679 - DNA, 494 bp, Homo sapiens
  misc_feature 416, 422, 423, 437, 457, 468, 472, 477: n = A,T,C or G
agaactgaggaaaaacttgaccaaaggaagccacccacactgataattgccagcctgggagaaatgactgtagaaggcacatccaggccccactcccagacccagtgcccaggctccaagcatctctccatactggaacagcacggcagctccaaatctggaactcataccccgatctgtaacccgtacctcagacctacatcttcaactgatttcagcccaactgtgaggctaattctgctttctttctttggatagaggcttaaaaataaatataaagaagatgatggacacgaacgtagattaatactcttgtaatacctttaaggagtaactactttaatagctttaggtaataactactgcaaacactgggatgaattggggtttatctgctttttaggtgaggggaaaancccccnnccaaaataaccccncctggggttttaaggttaanaattttaaaantttnttttnaaagggttggaaaaggg

SEQ ID NO: 680 - DNA, 246 bp, Homo sapiens
gcgactgaggtttacaaggtgactacgctgttctagtccatcttgaagaatacaaaatgaatcaaagagcatcgcttctgccctcaaggagcttcctatgtggaaaggaagatgtggtacataaaggatgtggatttctgccttggtgtcctgctggtgaattctctccagttataaaacattttgttaccttcattcgctcttaattaaaaagggaaaagaaactcctagggctctgacaacagg

SEQ ID NO: 681 - DNA, 447 bp, Homo sapiens
  misc_feature 156, 412, 416, 434: n = A,T,C or G
gcctgataagtacaactggtgctgctgggagacgcttacactatagtctgaacttctacagagccttttcctactgtaaacctcactcaaaaatgacagccttccatttcacaagaatcagagtcttgctatgttgcccacgtggtatcaactccnggcctcaagtgatcttcctgcctcagcttaccaaagtgttgggattacagatgtgagccacagtgcccagtctgtgtgtgtttttataattggaagcacatgacatcttttacacaatatgcaaatgcatattgaggaaggagggagagcaaatatgtctaaaagtaatcacaataagtcttgacccattaactgtcagatcaaaatccacaccaattttagattcagaagaacactttgtcttttttaaaaactntttntaaaacaccttcccccgntttttttaaaaaa

SEQ ID NO: 682 - DNA, 299 bp, Homo sapiens
agaactgaggacggtgggtgactggctcccctggcccttccttgctctcagcaagagctcctgccactgccacagtggaaaaggcctgaatttgggaaatgaagacgtcagagactcgcaacttcttctgaaagcccagccaactttcctacaagcatgactgcagacgtggaagagaaaaggcagatggcctgggttcaaagcccagcttaaaaacacatattctagctttgtgaccttggtcattttggttttacttccctcatctgtaaaacggggagaataaaggtctctaactt

SEQ ID NO: 683 - DNA, 500 bp, Homo sapiens
  misc_feature 16, 20, 34, 48, 51, 62, 73, 190, 332, 366, 382, 386, 399,423, 441, 471, 482, 484, 487: n = A,T,C or G
gctccccaatgaactntatnctcttcattggacntgtatgggattatnganaggaacttgcntacagagcggnccactagagctcagccagatcatcctacagtgaagctctcaggaaacaagtaccatctacaaggtgcctaaggaagcacagaggagagccacctccaaaatggataccctctccaanggtttgtagtgaaagaggcacagctcttggcctggagttggtgggggctgcgataagtgcaagatacttggtgacaggaatcgcgagcatactcttgtgttgtacggattctcagggtcggccctgcagaggaaagaactcngtcaccgcgaggtcctgccaacatgcccaaagtncccggatatgtgtgcngggngttaaacctaaancccccccccccttttaattttccnaaaaccccccaaaaaggnttggggccccttccttttacccccttaaangggggggggangntgnttttttgaataat

SEQ ID NO: 684 - DNA, 360 bp, Homo sapiens
  misc_feature 248: n = A,T,C or G
ggaggaggtgaacgcatgttttggcattacatctgggcttccagccctcatcaaggggaaggggcttctgactcctgccagcaaagggacttagttgctttcaagtgggattttattcacctggacagtcatgcaaccaaatcacaagcagagaggaggcttccccaacccagagtccccacacgtgacccttaatataatgtgtattgatgacaacctgaagcagccttgacttcagtcctcagganaacaatatgcaactctttataacaactggagtttcccagatttccaaagttcaaatgaagtgaaagacaatttctggtgagcatagacattaaaaatgagaaaacaaatttc

SEQ ID NO: 685 - DNA, 469 bp, Homo sapiens
  misc_feature 431: n = A,T,C or G
ggatgaggtaggaagagcggtggattctactcctctttcatcatttgaccttcaacaagtcaacctccactctctgggccaactcagcaaaccaagcccgaggacccgaccacctccaagatccacttcagctccaagatgctacagctctatttctccaagagccttcctccagcatggactgattctccaggcccctttgtgtgtatactccccacaaagggacactcacaaattgcactccaacaagaatgagattatcctctaaagtactgcgttaaagtgaggatcagggagaaatgaaataactctgagagacacttcctcctatacagaagcaagcaagaaactgggaaagggaaagtccttccgaacagaaggggctggagaaaactcataacacattagccttcactcttaaagctttcagncaccaaagaaatgcttgattccgaaatcggtttttgtt

SEQ ID NO: 686 - DNA, 310 bp, Homo sapiens
  misc_feature 14, 17, 19, 21, 38, 222: n = A,T,C or G
taactgatggtgangtntntnctaccagtttacttaangctgtatgtacgctgcttgaaccctaaaagctgggaaatgagccaaggccacggtgctcagctgaggagcaggtgtccctgagaacccaaacatcctagagtgtatctgggaacataccaaggaaaagagtctcatcacatgcggcagccaaagagccacaaaatcagcttaaaagcagcttanaggcgtgtggtgggtggatctctagagttctcctgatgctgcccgaaaatgtcctgtttgtgaatcctaataaactcatctactcctc

SEQ ID NO: 687 - DNA, 97 bp, Homo sapiens
caccagaactgcagatggatttccgacggatgaatcaccttcagcaaccccagcaagttctcattaaatgtttaccctaaagtaagattttatgatc

SEQ ID NO: 688 - DNA, 344 bp, Homo sapiens
  misc_feature 155, 178, 227, 273, 297: n = A,T,C or G
agcaatctcccatctttaacagatgaagcttaacacaagagcagcacaaaaaccgtgaaaaagaaggtggtaaaaaatccatcttctcagactaccttgctgatgaaaaaaatagctctgtgacacagttcaagccgatgaggtatgagcagaanagttctctgactgtctggaaagnctgatttcctgatacagacaccactcttttccccatgcctgaattctanatgtgttgatagatactggggcagccatccagggaccatgaggggnagaccaagagaattccagaaaggntgactttgttgtaacttcaacctctgaaccacttgcctactcttaac

SEQ ID NO: 689 - DNA, 193 bp, Homo sapiens
tcgattcaaatgttcttcacagttgtcacacccacaggatcacaaactcaactgaatctcctttaggtcaagtttctgtggaagaaactcagaaaatgggacctggagaaatactcttctcatctaagttgtcaaaacacctatggtcatttttcagtaactgataatccaaaagtaaaatattaaagtccag

SEQ ID NO: 690 - DNA, 306 bp, Homo sapiens
  misc_feature 19, 22: n = A,T,C or G
acagtcctgcatagtcctnctnagcctaataatcctggtgaccaactatacccagcagggaggacaaagctcttaacacgaaagagtgaggagaatctctccattacccttttacatattcagggaagagagaatatcgcagtcgctggaaacgaagggcacagcatcgtgttgctgtatggccacggttggccacagaaaggcagaaagtcatcaactgtatggaaaccagacaactctgacgatttctatgcaaggtgactacaccttactcgttctccaagtattaaagatcttttcatcctt

SEQ ID NO: 691 - DNA, 489 bp, Homo sapiens
  misc_feature 189, 350, 366, 373, 378, 409, 426, 453: n = A,T,C or G
attacagatgttctgcaagacaggctgagaaacagaatcattccaatcactcctgctgtatcctgaggggagactctccgcctgttcaacacagggacacgctgcctcccgtggcaaggtgactgtcttgctgctgactcgggcaaaaagaccatgagaatgaattcaccaaccagggttcccttcccncgtaaatactgtgagaaaatggatgtcagtctccagctgaccgcagagaaatcacggccaggtgttggcacttacagagaagaatgaatacagaactgctttaatcatacactcaggaaactccccaattgtatcaatgactctatataaggaaacgaggnttgggacctccaaacnaactctntgggnggccccaagcaaaacaattcaccccaacggnggccctatggacaaganaaactcctgcagttattctattttctnagctccctgctcctcgttttcctcaccttagcaaga

SEQ ID NO: 692 - DNA, 244 bp, Homo sapiens
ccctcttccaactggaggcttatcctgtggctgggaacatttcctgcctggctgcgaggagtgagactaagaaaccatacctcaggctgaggagagaggccgggtttgatatgtgtgccctggggaagaaaaggagaaaatgtgatactctctcatttaaagcatccacatcaaaaattgaagaactggattacattgctgtttacttagtcaagttacaataaacttgatttccttttgggtc

SEQ ID NO: 693 - DNA, 237 bp, Homo sapiens
agaactgagttaagaaaatacctgggaggaggagccaagatggccgaataggaacagctccggtctacagctcccagcagatgggtatcactatcttgcccagcctggccttcaactctggaattcaagtgattctcctgtctcagcctcccaagtagttgggactgcaggttgcacaagtacacctggctctgatttattattgaagactccaaataaagaacttgcagaaactct

SEQ ID NO: 694 - DNA, 147 bp, Homo sapiens
gtatccctgaccattcaggaaagagacatcaatgacccgaaacaatacaaggaacacaagatcttcatgaatcaaatgatacttggaatgaatacaccaataagaatttattgccaaaaagttactttattaaaacaaattttaaat

SEQ ID NO: 695 - DNA, 169 bp, Homo sapiens
  misc_feature 104: n = A,T,C or G
cgacagagttgaaaccagatgggatatcacacaattacaaacccacgagttttcctgttactttaaggacaaaggaagaggacatttgaaaagacagtagtttnagaagcccttgaaaatacctccatcaagaagctctggatctgcaaggggtgggggcttttgcatt

SEQ ID NO: 696 - DNA, 429 bp, Homo sapiens
  misc_feature 346, 372, 382, 392, 396, 397, 401, 405, 408: n = A,T,C or G
cgataatatgctgtatgagcctcctgctctgctgcccattacctgcgtcacctccacaagctactgaacctcaaggaacccatctcctcatcaggaaaaaaaataagctttatcagggtctgaactctgtaggtcttcaccacggctcaggaggatgaggagcagtgacaggccaaactacgagaaaagacagagggaatcaaactcaacactgtgtctaaacctcctccaccactgttgaggggatcctggcatcagatggggaacagctctaaatcaaaataacctcactactgtgcttttctgtaaaaccaggtaaagatcaaacaagcatgagttgaaaggntaaaaaaaaaaaaaaagggccggggnggccatttangttgggattnaacnnggtnaaanttnttaaaaagggggggccccccc

SEQ ID NO: 697 - DNA, 185 bp, Homo sapiens
gctgaaacatgactatgatggtgacctagctttggccatgcaggagatgacagtggcaagagaaggaaaatctgggtttcagatcgacatcatggagcagagctgcgccaacaacctgaaatgcatgctcacagtggcctgttaagagggacagaaatataaacattaatgaatgaaaccactat

SEQ ID NO: 698 - DNA, 292 bp, Homo sapiens
tgtaagaaatgaacagacaaagattaaaagactgcagggttgaaggaagctcatggaaaaatgtgcagagatgcataaaggaaggagaaaagtgcagcaaagccacatagaaaaatggccagaagggtcactcttagccaccaccacacagagaaatgaactaaaatgaaaactcacaactcaggaatatggaataataagcaatcagaaacataaatataagcagttttatctattcattatttttattctactattagaataaattcatgactaaataaaattattcagc

SEQ ID NO: 699 - DNA, 472 bp, Homo sapiens
  misc_feature 379, 405, 419, 429, 443: n = A,T,C or G
gtcctgcattggccaactgaggattcttccaaacaagaggccctagtctgtgactgtcaagccttgccatcaacactcctctttggtggagagctccctgttggccctgaggcaggagtcttctgagatcttgacatatgctgggcttgatccaggcctcagtacaggtgaggaaacggaggcctgtagaagtgaagtgacttgctaaggggcagggctgaggtctgaggcctggtctgagtccaaaacccgggcaggctctgagagctccaccctgctgccatcttacgtccaggcagggcctgcaagggacagcaatgatgcaaagacaaacaaaggaagagcaaccccagccctgccacaaaaccagctgggaccnccggccaaaaggagttattcgacctntccagcctcagttnttcacttgtntatgaaaccaacangagtaaatatagaatgggagttgaaacgc

SEQ ID NO: 700 - DNA, 203 bp, Homo sapiens
agaactgagatctgaactttaatactcttcatgcttacagaccccggctggcctctgtccctcaccattctgtgtctagaaaaagcagttgagaacccatattcttcaagaacccttccccattaccaaacaccatattattatatttaatctacccttcagttcttttgtagccaaattaaaatgtattactctgaagaaag

SEQ ID NO: 701 - DNA, 372 bp, Homo sapiens
  misc_feature 342: n = A,T,C or G
atgcgggagagaatatttgaccttagatttgtccgcctgcatctttctcctgacgccaacctcagttcctcctctgactgcctctctccatctgtattgcaaaacaccaaactctctgccaaagaacacatccaggtgtggccatgtgactgagctctactcagtgagaactgttgtggcacgttctggacgatgcctcagtgaggcgatgcgcatcttttgccttccctttgtctcctgggaagtgattttgaggatagaaggtatgcgctgaggatgatgggacagaatcatgaagcctccatccaagacttcgctccttcctatggatttcttttatgngggaaaataaataattggggggggtggaaa

SEQ ID NO: 702 - DNA, 396 bp, Homo sapiens
  misc_feature 28, 200, 323, 335, 336, 337, 339, 346, 352, 354, 356, 357,358, 359, 362, 363, 364, 365, 373: n = A,T,C or G
gactctggcgagctcctgcattacctcncatctgtgactctgaggggagaaagggaatgacatccaggacaagaacaaagaatagaagaggaaaggtgctgctacaagttggaaagaagcagacagaggtccctgctgattctccaaatatgtgtctaatctgtttactgagttccatagcacttggagccatccatgcnaaaatctgtagaagagcattccaggaagagggaagagcaaatgcaaagacgggcgtgagagcttggtgcatacagccatgggccaaataaagtttccttggaatagcaaaaaaaaaaaaaaanggcggggggggnnngnccatttnggtttnancnnnnccnnnntttttttnagggggggggggccccccccccc

SEQ ID NO: 703 - DNA, 495 bp, Homo sapiens
  misc_feature 16, 26, 32, 35, 45, 48, 54, 218, 226, 267, 357, 369, 451: n = A,T,C or G
gtggtgttcccactgntgaagagcangcgacnggnaaggaccatnaancaactnaccagctaggagtgatgtactatgatgggctggggaccactctagacgctgagaaaggggtggactatatgaagaaaattcttgattctccatgtcccaaagcaagacacttaaaatttgcagctgcttacaacctcggaagagcttattatgaaggaaaaggngttaaacnatcaaatgaggaagctgaaagactgtggcttatcgcagcanacaatggaaatcccaaagctagtgtgaaggctcaaagtatgctcgggctgtattactcaaccaaggagcccaaaggggtaaaaaaaggcnttttactgggcnttccgaagcatgtggcaatggaaatctggagtcccagggtgcacttgggctcatgtacttgtatggacaaggcatccggcangatacggaagctgccctgcagtgcttaagagaagcagcagaacg

SEQ ID NO: 704 - DNA, 369 bp, Homo sapiens
aactgaggaacccttgggtgcccagctgctgtccattctctacacttatcccacctgatggaaggctgttaagaaaaacatcactgcaatgcctaataaacagacatgggtcccagacccaataagagtgaaaccatccccctatttaaatgaaattatggctgatgagaaagacaaattaatttctctgtccctagtattacacaaaactttggatgctgccattgttacaattttattttccccaggagctcagagtcccaccttcattctttttgtttaatgcttaagcttgcctgtccacctatggaagactagaatgagcaaagaccatgtattcaatgatctgtaaatctaacaggaaacaat

SEQ ID NO: 705 - DNA, 153 bp, Homo sapiens
gtgtgatggatggagcattggagcaaccacaagggaaaataatacagacatgaagaaaacagtaaagatgctgtccctgacatcattgagcagtcagcaactgcccactaccaaacttattgtcatgtgaaaaataaaaacctccaattcttt

SEQ ID NO: 706 - DNA, 131 bp, Homo sapiens
  misc_feature 14: n = A,T,C or G
atccaggaggtaancaatcaactaagagccaggcacctttttaagtccagtaagaagaaacatttttacaacctgctgtctctgaagtctgctatctgagattcctctccacaataaaacttggtctccac

SEQ ID NO: 707 - DNA, 323 bp, Homo sapiens
atcatccacaaactacaagtaacatgtagttacaacatggggctcagaatgtaccaagatcatcctatgtctacagaaaggagtaaaacacaaagactaaacagagttacctatttcttgttagcctgagaaaaattcttttcagatgtctttcattacctcagaaatggaggcaaatgctttaagaagggtcatataatactttgaaaggctattgccatggtgtggttattaagctcttgggaaatgatgggcttctcttcaagtataaggaacaattgtgccccctaagagtcatcttgaattggaatgaaataaactgg

SEQ ID NO: 708 - DNA, 273 bp, Homo sapiens
  misc_feature 83: n = A,T,C or G
gacctgcattaaggtcgactgagtttaagattccccagatgccttggataatttgttttggaaaacatatattgaagataccnagagccacagtatgacagaagactaggtcccagaatcacaactggaaggaaagtcatgcactaatgaagaaaacaattcttaaggcttatatgagctgaaaacaaacttctgtcatgttgctgcctttatccatttttaaaagatgtttgtcatcagtggtgctactctaataaaatacatcatgagcac

SEQ ID NO: 709 - DNA, 390 bp, Homo sapiens
  misc_feature 318, 326, 328, 330, 334: n = A,T,C or G
gcctgacaaaataagtggctgtgctcggaaagcccaagtgacaatgaagtccaggtaacctctaggaattgcaggttccctcttggagctgaggacagtctccagtctccagccagcaagaagccagggccctcggtcctactgctgcaaggaaaggaattttgcctgtgcccggagtcagagtggaagccagttcttctccagtgaatgtgaacgcagcctggccagctccttgatggcaggcgtgagaccctaagtgggggactgagtgtacctggacacctgatccataaaaactgtgagaaaaatctgtcttgntttaaagncncntccnttgggggcaatttgcagcattaaataattaagtacaagtacatgtcacccaaggtc

SEQ ID NO: 710 - DNA, 430 bp, Homo sapiens
  misc_feature 343, 347, 348, 349, 350, 351, 352, 353, 354, 355, 356, 357,358, 359, 360, 361, 362, 363, 364, 365, 366, 386, 389, 390,394, 396, 397, 400, 403, 408, 410, 411: n = A,T,C or G
aagtctcaacaattaaaagaaaattagaagccaagtgcagtggctcacacctgtaattccagaactttgggaggccaaggtcctgcataccactgaaactactgatgtcagctttctgaaggaccccactgagaagactcactaaagaaagcagtttccatgtcctgatgattttgtctcccttaccctgaccaatcaatggccctaatttttggtcattccattttcttgccctccatgatacccttaaagaccctgcccagacctcgttggggaaatggatttgagggtctccccccacctctttgctgggaagcttatgatcattaaactatttctctgntgcnnnnnnnnnnnnnnnnnnnnaaaaggggcgggggggccanttnngttngnnttnaancgggngnntttttttaaaagggggggg

SEQ ID NO: 711 - DNA, 473 bp, Homo sapiens
  misc_feature 321, 332, 340, 352, 449: n = A,T,C or G
gccataaggttcttaagagcagagaatattgtttctgtaatgattctcggcaaaagcactcagttacaggattcataccacatgatagattctaaatcttgggaacagaatcaagaatccagaaatggatggaaccacacgtatatgaacaactgattttcaacaaagataaaaaggaaaagctcacctatgaaagagtgcttctctccagccagacaataggagtagggaagagaccgatgctgaatgactcacgaaaatactgcaggaaatgacaggaccgtccccagaagtcccttccactggcttttgccgggctgnttcattaaaanctggcagnaaggatgaatcncaagaaaaaggcttattgtaacctcacatcataaattttataaaactgcttcataaaaaataaccttggggtccaggaactccactagaaaaatgtncaacctgtcttcaaattggggaac

SEQ ID NO: 712 - DNA, 464 bp, Homo sapiens
  misc_feature 131, 133, 136, 139, 152, 154, 156, 164, 167, 171, 174, 175,176, 177, 178, 179, 192, 202, 209, 215, 219, 226, 238, 246,249, 254, 257, 324, 344, 345, 346, 398, 402: n = A,T,C or G
ttcctggaatagcacctgatacacaaaaggcatccagccaatgtttgctgaacaaagaaatgaaggctgcctgcatttactaggagaaggatgacaaccacatgggacaaaaaaagaagtttttttggtgnanccnagnccggggggtccgnantnggggggtnttnggcntannnnnnttaaaaaatgaanccgcggactntcgcggnactgcnctgngcagggnaaaaaacagtcnttccgganccncccanccnggggttggaaacgtgctccgttacattccaactagatggggtttctctctgttgtccaggctggagngcaatgatttgaaaattggnnncctttaactcttgagctcaagcaatcctcctgcctcagcctcctgagtattntganagtataggtgtgtgccaccacatccggctccactttttgttttggaagattcccctcaacat

SEQ ID NO: 713 - DNA, 316 bp, Homo sapiens
atgagcataaatgagagttaatgcatctaaaactgaacacaaacacctgggggaggaactgtgaaggaccctaacaccaccaccaccctcaccacccctgttgtcccgcatatccacagccaccatggttgccttggccagcagaagcccaaaactgagggcccttgtgaaaccagctgttggaatatataataaaggagaagttcattggatgctaactcaaacaggaccaatgaaatagcaacatgttttcactatcgggtacgtgtcttggtagactcacggtaaatgtttaataaatatttgatgaaagaat

SEQ ID NO: 714 - DNA, 513 bp, Homo sapiens
  misc_feature 364, 372, 375, 386, 401: n = A,T,C or G
agactctggggagctcctgcattaagtcatgaactgagaaatgaagactggagaagcaatgggacacacaggcaatggggctaggcattggttgtccccattcattcatgcagcaaatggccattgcgtccccttcctgtgctaaacctgtgcaggtgctgccggacttcctggacataagaccctgtccgggcactcaccaccatcatgcttgaggccctgccctggtgtcagtctttccacgatgctgactggcagtgtgtcgggacagtccccaggcaggcctcccggatacctgtctagattatctctgtggtggatgtagcctttgccccagcattcaccagtgacaagaaaaaaaagnacttttanttnttccaaggctntacctgggtggtggnggatgctgctgtcactagaaggctactgtaaataaagcctgcttaatctccttaacccggatggcttgtgtcaaccgggttggagccgccaggaaacagcccatgctttaaa

SEQ ID NO: 715 - DNA, 323 bp, Homo sapiens
  misc_feature 34, 45, 48, 55: n = A,T,C or G
agacgtctggggagcacctgcattaatgtcgaanctgagcatccntcncaactgngatctgtgatttgggcacggcttggtggaggcagctcatttctgcttcacgtggcatcagctgaggtggcttgcccagaggttgcagaactcgcgtccaggacagctcactcatgtggctggcaagttgatgcggtctgtcagctgggagctcagcagggtatttggctgggggtcttggttctcctccacatgggcttttccacgggttgcttgtgcttcctcatggcatggtggctaagtcccaacagtaaacgtcccaaaagaac

SEQ ID NO: 716 - DNA, 320 bp, Homo sapiens
  misc_feature 30, 86, 93, 99: n = A,T,C or G
gaagtcaactgccatttttcgtgagctgtnaagctgacctatggaagagggtcccacatgggcagggaactggatgtcttttgccnacagccnagaaanggatggatcctttttactaccccaagaaatggagttgggagcagaatcttccccaagctgagcctttcagatgagaccacagaccatgcctggcaccttggattggcagccttcttgagaagacccttaaagccagaagacatccaactacacccattgcctcaagttgcttgaccccacaagatacccatgaagataataaatgttgtcttaagctactg

SEQ ID NO: 717 - DNA, 251 bp, Homo sapiens
  misc_feature 22: n = A,T,C or G
gctcactttcaaaaccgggggnggtcagcccatttggtcactggatgaagcaggatgcaggctgaatggagaggtggtggagttcgcagtctgtcccaggcactccctcacccagctatctgccaatacaccactttgatttatctattgtaaagctttttaaaagtgtcccttaaagtagcttaaggacaaatgtgaataaagcttcacagcaagtggagatgcagcctgaagaggcacgtcataagctc

SEQ ID NO: 718 - DNA, 93 bp, Homo sapiens
atctcccataaattcccaacatcaactatttaaccgtatcatctcatggttaaaaaaagaaaaaagaagaagatgatgatgaaagaaaagaag

SEQ ID NO: 719 - DNA, 470 bp, Homo sapiens
  misc_feature 61, 63, 86, 99, 100, 104, 105, 117, 137, 159, 195, 266, 281,299, 319, 337, 344, 351, 393, 397, 398, 417, 421, 423, 428,429, 432, 440, 452, 453, 457: n = A,T,C or G
tagtgtcataagaacggactcggttcttcctgcgtgaccacggatgcttctgtttgagaanangcatcccacggtgggacgtttanatcaagaaagctnntgannaagacatttgtnaaagggcaaccttgggtgantgggggaaattatttctttttnatcaaccccttctgcaatacaagctggaacctggcnccataggaagtttcgggacaattacgggaccatcctttttccttttctcttctttctttttttttttggtnggattggttttgganacaaaagtcttttgtttncccaaggctgggagtgcagntggcgcaaatccccgggnttactgnaaacctnccgccttccttggtttaaaggggaatttttcctggcttaaancctnnctgaagataacttgggaantttnanagggnnggngggaaaanccaaaaaaaccnngggnaaaattttttttg

SEQ ID NO: 720 - DNA, 417 bp, Homo sapiens
  misc_feature 86, 90, 115, 147, 233, 267, 385: n = A,T,C or G
gggagtaaacaacaccctcccagaagatgatacaggccaaatcccgcaacgagagggctgggtcggaacacacacaggcgcacctnccanaggcccccgacacttcatttaaggnaagaacggagcatcccacgaacgggaacaagnttgggaacctgggatttggcttcggtgacaccctaagcaaccggggtgaagaacgcttaagctggggaatcccgctggccttctgntcatcaaagcctgtcttttcaccggccaaccttnccaacccctaagcaaccccccgcttcccaggaaaaataaagtgccacccacgtcgcttcaatagcaccggcccaaaaaactcccactttagttcctggaaaaattaagtccccggcangggggcctttttttttttttaaagggtttttc

SEQ ID NO: 721 - DNA, 161 bp, Homo sapiens
  misc_feature 82, 123, 127, 137: n = A,T,C or G
gtctttggacttagtctagaactatactactggctctcctggggtctccagcttgcctactgcagataacgggacttctcanactccattagtgcatgagacaattccttaaaataaatctgngtgnatgttattgnatcaataaaatatatatgtatcct

SEQ ID NO: 722 - DNA, 485 bp, Homo sapiens
  misc_feature 377, 384, 386, 399, 404, 411, 417, 420, 423, 437, 448, 457: n = A,T,C or G
gaggcaggtctagaggcctgggagacatgctggacaattccgaaaccaattctggttacagaaggcgacatgtctttcatgtgggccattcaatgagaatgtgggggacccctggcagagatcaggaggccccaaagaggagatgacagagcagagcccaagagaagcatccagaggaaacgtttcggatgactcctcccttctccggccagccacttctgaaggagggtagcgcaggggcacagggtgagggctgacctgcctgtgagccccggccctgctactcactggctaccgttacctggacagatcaccacttcgctgagcctgagtcctcatttggaaaacaggggaaaaaatacttattttttaaaaanacatggntngggcattaaaatnaattnttgccanattctntanctntgtgaaagtcagcntatggaaggcnctggagagnttaacaataaaaaaataccttggccttt

SEQ ID NO: 723 - DNA, 290 bp, Homo sapiens
  misc_feature 1, 33, 36, 40, 44, 73, 84, 89, 111: n = A,T,C or G
ngatgcctccaagttgttggaaggaaagtatcngancatntacnagggaaaagggccacattgttgggcattncaagccacaanccctnaagcttgagggtcaagaagctnacaagccagcatttaaccactaaccccaccaaggtggaaaggggaagactttcgaaagccttcaaaacttgccccaagcttaaatggccaaggtggggaagcagaagatgaagttgtcccttgcttgaaaatttgcaagactcatgaagccaaaaataaaatgtaagtttgttttaagg

SEQ ID NO: 724 - DNA, 629 bp, Homo sapiens
  misc_feature 8, 25, 35, 38, 46, 51, 64, 69, 70, 74, 75, 81, 98, 114, 118,133, 140, 141, 142, 154, 159, 170, 197, 443, 455, 458, 468,470, 489, 492, 500, 508, 539, 572, 575, 598, 613: n = A,T,C or G
tttctgcnctccctccaccctcggngctctgccgnctncacccctnctttnattaaagccctgncctgnntggnncaaggncaggtgggcaccctttnaccccgagaaagaatntttnaatgggcaaaggggnatttttnnnccaccccccttngaccnaggaaaccccnaaaatgggccccaaaaaccagcaaccnagcctttacagggagacttttcaagaggaggaggaattttggccccaaaataaaaccacttggtggggaggtattttgggatccccgaagacaaaagaaaaccctttgcacaaagatccctcaccttgcaaaggacaccatttcgctaaagcccatcgggagggggcaagtcccagggcccgggaaaaaagcaaattttggacctttctccttgggccggaaacaccaaaaagccaaaagttcccnggggaaaaaagnaangttttaaggngnttaaaagaggcattttttnttnggactttnccacgganggggaaaaatacttttccaaagcccaaattnccggggcccgggcaccaaggaattttttttggntanggggtctttcaaggggaagcctnttggggcccagaaanccaaaaaaggtttggc

SEQ ID NO: 725 - DNA, 149 bp, Homo sapiens
  misc_feature 32, 48, 64, 73, 96, 132: n = A,T,C or G
agaactgaggttgtactggtcagtggaccatngtggaccgctgggatnttgggcaggggtgccntgggatgangggcgggtgggaccttttatatnatggggaaagcactctcacttattaaagatcttggnaaatatttaaaaaattg

SEQ ID NO: 726 - DNA, 113 bp, Homo sapiens
tgttcctacctggctcaaggaaccctgcttctctaaagggggagcgctgcacccggattttggtcttttacgttgggcctcagctcactgtcagaataatctttctaaaacac

SEQ ID NO: 727 - DNA, 366 bp, Homo sapiens
  misc_feature 22, 38, 42, 59, 60, 64, 68, 69, 71, 72, 73, 92, 104, 111,118, 142, 174, 182, 191, 193, 226, 231, 245, 306, 347, 353: n = A,T,C or G
cccagaccggtgggaacccccntagtcctgcttatttnggcntgaggagaggtaggctnncgancttnncnnnaaaaaatgggttttttctnacattgggaaantctgacnccttctnagaaaataaagtggcttgtgttgnccaaacccctttaacccaagggaaaaagtccncgaaggancctctttgngnactcctaaagccttattggaccagggtaccttncttcnccccaagggagaanccttgtcttgttccaataagtggaagacaaggtgggaagaaatttttttggcgccctaccntttttttcccattttcaaaaaaagaaggctgggccatttgnttaccnttcttgtggatcg

SEQ ID NO: 728 - DNA, 167 bp, Homo sapiens
  misc_feature 15: n = A,T,C or G
gagaggtaggcttgngaggcttgctaatctttgaagaatgagacgaagttccctcccaaaattactactcccccactctggaagatgctcacaaagccaccagtctcaagaactatattcatcaccctttggatgggtttttttttttaaataaaaaactaaaaacc

SEQ ID NO: 729 - DNA, 213 bp, Homo sapiens
  misc_feature 72, 73, 75, 79, 80, 186, 188: n = A,T,C or G
gattcttaaagcgcaaaaagccccaatcatttctttgagaacaaggacgcagatcttacatcacgaacactnngnactnnttcatgggtgcagtaagaagatggaatcatgaaccaggaagtgggtcttcaacagacccacctctgcccacaccttgatcttggacttcctaagcctccattaacncngagaaataagcgtgttttttaaacc

SEQ ID NO: 730 - DNA, 451 bp, Homo sapiens
  misc_feature 19, 20, 46, 53, 80, 81, 82, 367, 378, 381, 401, 418, 429,433: n = A,T,C or G
aactgagacatcctgcacnnaagcttggccccttattacagagctngaatgcncaccggaaaaggagtccagtaaaaggnnngagcagcttcagggcccatggctacccccatgcaaaggaggtgaggccacagaaccgaactggggtctgttcgcctggcacagcaaaagtcaaacactaacattaggatggcagcgagaggaagtgaagcatttatttgcaagcaccaagcaaacagagttggacagttgatgcctaagatcccacctgcccggtggcttgcagaatttcaggatagtccagggatcaccgaaagagatcaccaaactttctctatgaagaaccaaatactaccaaccttccgtntttgccggccncgnggcttttgaacttaactggntaacttttcattaacgngaaagtagccncggnccatatgccaaaaaaaat

SEQ ID NO: 731 - DNA, 542 bp, Homo sapiens
  misc_feature 14, 34, 39, 42, 44, 89, 91, 93, 175, 196, 227, 230, 271,310, 338, 357, 365, 422, 451, 455, 462, 479, 492, 504: n = A,T,C or G
ggacctgtgccccnattctgaggttttttggtgntcagnggngngggctatcgcctttaaaataacctgggcctgggcagcaacatggngnantgaaaaaaaagcaggctttggaatggataaaactatacttgaatctctgctctatcaccttatcatgttatggcaagccagntacggaacctccatcatttgncagtgcctaactcagcttctcgcctgctggncangctctggaaagctgagtgaaaacagaaagcagccagaaagngctgtggggacaacttgcaataagtgtcacatgggcctnctcctctttttatgtgccccatgtccancctttttccttggtggccnctttccanaaaacttttggaaaccattgggccaaagttacctggaaattttcccttgggcctttnaaccttttgaccattttggtaaaaggtangaanatggatnaaaagccttttaagggnccaaagggcaggngggggcttcaanccccttgggcttgggggtaaatggggaaatcaattttg

SEQ ID NO: 732 - DNA, 267 bp, Homo sapiens
  misc_feature 2: n = A,T,C or G
tnacttccagaaaagagtgaccatttggcattgtccaaccattaagatgtgaagactgttttggagttcctggtacagtcaatgttgcttccctgtcctcttgcttccaatgcttggagccacaacagccatatgcaaacatgagtgacaggccaaaaattaatcatagagacatctgtcctgataccaccacgccagtgaatcaataccagcaacactgcaactctgcttattatgaaggaaaaataaagctctgttttataaagc

SEQ ID NO: 733 - DNA, 755 bp, Homo sapiens
  misc_feature 57, 87, 92, 123, 125, 145, 151, 159, 164, 169, 173, 174,191, 193, 218, 235, 236, 253, 258, 265, 273, 288, 299, 315,336, 363, 373, 398, 412, 415, 447, 464, 476, 485, 491, 508,512, 533, 534, 560, 567, 568, 616, 617, 620, 622, 674: n = A,T,C or G
  misc_feature 682, 703, 717, 718, 734, 738: n = A,T,C or G
gggaaaaaaccttgggaagggccctttccggcccggggggtttttgggaaggggggnaaccaaaaaaaaccttttcctttttttttnggccnggggggggcccttttttttttttcccaaggntngggggggggggggaaaattnccggcnaacccccnggggntaaanttcnncggaaaaattaaaaaananccccttttttttttggtaaattggnaaaaagaccccccgggnnccccaacccccccaaanttggnggggggnaaataccnggggggccccccaanttttttggggnaaacccaaaaaagggnaaattggggggaaaatttttngggcgaacccggcccaaaagggggttnttcctttttnccaggggccaccggccctttttggnggggttgggggganagnaaagggggccttaatttttccccgggccttanttggaaacttggggggnaacaaaccaaanaacaaaatnccggcnttgcttctttgatggcnccgncctgttttccgggcttgtcanncgcaagggccgccccggctctttttnttaaaanngacctgtccggtgcctgaatgaactgcaggacgaggcagcgcggtatnntgntngcccacagcgtctgccactgtctcgacgtgtactgacaggaagggctggctnttttggtnaaagcgggcaggctctgcatntaacttgtttgcgnnaagatcatatggtgangaanacgggggtggatacctt

SEQ ID NO: 734 - DNA, 367 bp, Homo sapiens
  misc_feature 29, 49, 97, 101, 106, 114, 137, 191, 292, 321: n = A,T,C or G
gggagtaaacaccctccaaagatgatcanccaaatccgcagcgagaggntggggtcggaacacacacaggcgcacctcccagaggcccccgacactncatnaaggnaagatcgnagcatcccacgacgggaacaagnttgggaacttggcatttgcctcgctgcacctagcagccgggtgaagacgcttanctggggatccgctgctctgtcatcaagcctgctttcaccgccacctccaacccctagcaacccccgctcccaggaaaaataaagtgccacccacgtcgctnaatagcaccgtccaaaaactccactttanttctgaaaaattaagcaccgaaggagcctttttctttttgaagggt

SEQ ID NO: 735 - DNA, 484 bp, Homo sapiens
  misc_feature 52, 56, 68, 85, 123, 156, 165, 169, 332, 351, 353, 356, 359,370, 391, 400, 443, 467: n = A,T,C or G
ctcccgatggacccgagattcagggatctttcccgggtaaacggtgggggcnggcngaaagaaatgcnatagagctaatttaagntctagatcatgatagcctgggatatgggtatgaactgntattggtcgggatttcctggaccatcatatggnaatgacagnttgntatgtaatggagatgactgcccagacctatgtaaaaatttaagtttctactaaaaatattcttcttgaagcttatgagactattttcaaggaaataacttcctaaagaaataggcccctggtgaaacaccagggaataaaggaaataaattgagaaaaatccnccaggcttatttttattgntnccnttncccgggggttnaaaggaatttttaattaaaanggttcacanaaaagcccttttcatttattttaaaagattggacatattttgnccttttacttatagctagagcacncatactgggaaaggtta

SEQ ID NO: 736 - DNA, 192 bp, Homo sapiens
  misc_feature 80, 152, 177: n = A,T,C or G
cgacctgcattaagtagcactgagagctgagatccaccctgcattcagtctgaagtgacagaagcaagagactctgtctncaagaaaaaagaaagaaaaggggtatttaagctccagtcatctggccctttcttccatctcatattttgggnggcttctgtcacataataaatatgnattcattttctcctg

SEQ ID NO: 737 - DNA, 271 bp, Homo sapiens
atcccagaagccttgaaaacaaagagcccacaattgcagtaaaaagcagcagcccggcagccaccagagagggcagagtcccgcaacctcccaccactttgaaggagctggagctccttcaaagcctcattcaaaagaaattgtcattattttacctatctggtgtttcccgggaaccctacttgcaaggctggctttatgtgattaaagttcatcagtgtaaaaaaaccttttccctagtatgtttgtcaaaaacaattaaaggtaattg

SEQ ID NO: 738 - DNA, 210 bp, Homo sapiens
  misc_feature 17: n = A,T,C or G
gactgaggtgccgtgtnttggagtagtgtgtcctgtacctgtcacctttaacaaacaattattgagcacctactgggtgccagatactccaccaggctctgagaggacagaaatgcataagacacaattcctgctctcaaggaggcctttcaaaaagaagagagtagaaaaaattcacacatttcccccattccaaaatgacatctgaag

SEQ ID NO: 739 - DNA, 389 bp, Homo sapiens
agcctgcattaagcaaactgaggagttcgcgccctctgttggtgttgtaatcaccgcctatgtggagatcctacatctctgggtcctgtcagtgtttgtcaccagcctctgacgtgcatttataatcatctgctggacatttctacctgggaaatttgaattcttggtattttgcataatgtgttccaagtagagctaattgtaagtccttccaaagagaatgctcatcatcttttttttgtttactcaaaaagtcccaccatacaataagctcttcaagaaagatttgtacttatgaccctgaatgggttagtgtgtttatgctttgtttagaggcattgaattttgtgcattcaaaatacctgaaataataccatcctggaccggtt

SEQ ID NO: 740 - DNA, 214 bp, Homo sapiens
agaactgagaggatggaataaaaaccgcaactcacaacttttcaagaggccaccagtcattagacactggcatccgttagaactgctgcaagcttaaatcaaacagtcacctggaaggaacaggtctctggagactcccctctagctctgagatctgtatttcacagttatttgaggcactgttaaaagcagagaataaaatagttgaaaattc

SEQ ID NO: 741 - DNA, 216 bp, Homo sapiens
  misc_feature 159, 181: n = A,T,C or G
aagagaaacttcatcagcgtgtgtcccggagtgaggacgtttggagcaggagcactcactgccacctgtgatgggcatgaagctagcatccatgaccagagttttgtgctgttgcaccattacaaaatgagcacaggagggtggacgggagctctctgnacccttcacttaattttgctgnggaacctaaaactgttttaaaaataaagtcaattg

SEQ ID NO: 742 - DNA, 473 bp, Homo sapiens
  misc_feature 16, 17, 61, 310, 342, 359, 375, 390, 392, 398, 409, 425,431, 439, 447, 451: n = A,T,C or G
caagagaaaccaaggnngaagagaccaagaaagaaatgagaaagagatgaaagggtgaagngacagaaccttctgagctctcctttcctgctaaatcccaggcacatgctccagattccttaggcaaaggaagaaatgaaaggagagaaagagaccaaaattttaaactctattaaaaaggactgcctgatatttatacccaaaagaaccaatgatgccatgggatctaactaagatattaacagatatgaaaagagattcaacagagtagaggagcttcagatatatacctgtcgtgggttggctctgngcttcccccaaatctcatgtcaaaatggaatncccaccccttgaaggangggcctggggggaggngattgaatacgggancnacttgnccttgcttttntagcgatggagttctnagaaanctggttgnttgaaagngcgnggacttcccctttctggctttt

SEQ ID NO: 743 - DNA, 764 bp, Homo sapiens
  misc_feature 31, 37, 417, 461, 469, 493, 504, 517, 522, 540, 547, 559,566, 573, 575, 611, 621, 643, 663, 673, 686, 702, 731, 750: n = A,T,C or G
ctcgcggttgaggacaaacttttcgcgggcntttcangtggggggaatcgaacgggaatccgaataaaagcttttggaatggaagcccggccacccattggggaatccgggcccatttggaaccaaagaatgggaatttggcaacgccaagggtttcttcccgggcccgctttggggggttggggaagaagggcttatttccgggcttatttgaacttggggccaccaaccaaagaacaaaatccgggcttggcttcttggaatgcccggcccgtgttcccgggctggtcaagccgccaaggggggccgccccgggttcttttttggtcaaaagaacccgaacccttggtcccgggttgccccttggaaatggaaacttgcaagggacgaaggccaagccgccgggcttattccgtngggcttggcccaacgaacggggccggttccctttgcgccaagcnttgttgcntcggaacggtttgtcacttgaaancccggggaaanggggaacttggcnttgcntttttggggcccaaaaangggcccngggggcaaaggnaatcttnccctggncnaatttttaaaccctttgggtttcccttggcccggangaaaaaaggnaattcccaattccaattggggnttgaaaggccaaaatgggcngggggggggnttgggaattaccnccctttggaattcccnggggtttaaccctgggcccccattttcgnaacccaaccccaaagccgnaaaaaacaatttgg

SEQ ID NO: 744 - DNA, 571 bp, Homo sapiens
  misc_feature 21, 29, 36, 57, 76: n = A,T,C or G
agaactgagcattttccagantattcaangcttcangatgggcctgggatctcactnaccgtttgcccatacttgncgctctattggcccacaagactccaaaagacagtgatgataaaggaagactaggagtgaaatctaatctctgtaacattcctagatatcaggaaggtcagaaagcagaagttctaggagcctggacatttgccaccaatgcctctatgtagcaatcctccttgataaatgcccataaacagaaatcaggagataatgggttcacggaaatgagagactagactgcattttgcttccagcccaagcctaacaaaggcagggaaaaaaggcttcatttaaatgagaaacagagtcctggaatcaaaaagctctttaataacataacactaaatttaagtcagaagtgggtaattttacttttgcataatgattggactcatagacatatctagtagaaggttgaataatttgaggttatacctgggatgagtaaaaggtttaaaggatcagatcaaaaaaacaaaagttcaaattaaaaagagaaggttgtgactgc

SEQ ID NO: 745 - DNA, 396 bp, Homo sapiens
  misc_feature 35, 95, 99, 103, 125, 145, 336: n = A,T,C or G
aaccttgagaaacatgcctgggactaccgtgcctnggagggaggggccagacaccatggggagccataacccgaggtcccccaccccggtcattnccancaanaaaaccgggtccttggaccaanccaccacccagccaagcttnccaagggcacatgaaggggaagtcccgcccaaagatcaagcaagcccgggcaaagcttgacccacaagcccaacttgcaagacgccatgaagcaaagcctttaaagcaagcttgaaaatccaccaaagatcaaacttggaaagtctccaagttcttggggtgccaagtatttctttgtttgtatgcccaanaaagtattggggggctcttttgttaatttggattaaattaaataaatcattggggttaat

SEQ ID NO: 746 - DNA, 211 bp, Homo sapiens
  misc_feature 145: n = A,T,C or G
ggagtatgcctttgatcttctgaaacaacgcagaaacggacccggtctcgcatgctgagttagaagaactggctttgtcaacatcttcctgattcgatttcacggcagatgttgttcttggaaccctgtgtgaagcatttttagnatgagttgtaacatgcacagcctggctagtaatgagtttattaaactgctgcttatgtgtcttgtt

SEQ ID NO: 747 - DNA, 527 bp, Homo sapiens
  misc_feature 17, 45, 52, 66, 76, 87, 104, 119, 123, 216, 472: n = A,T,C or G
ggctacctgcacgagtngacttgagggatgcttctcatggatgcngtagggncttttcctcaaccntatcccactnaattaatggcncgctgatcacaagtgtnatgaatagaaagccnaggnaacatcttaactttgcatgaattttattttggctaacgaaggctctgcagaatcatgaagcaaatgagaaagatgatagagctccttggcggngaagcagatatattgagaagatgagaataaagacaaccgttgaaaacagtccaggaaaataaaaagcctggacaaataggatagtttgctgctgccttattactctgccattgcttcatgataatcagttcttcatggcttcttcatgcctctaatcaacagacttacttgtggacatacaaaaccaagaatctagtccagtaaatttgaggggcttcttggtacctcaccacaactaccttctgttaattaatgngcaaatctttgaagaaattatttgaaaccttgtaaaaggtatgattgggaaaaat

SEQ ID NO: 748 - DNA, 198 bp, Homo sapiens
gagaggcacaacaacgattctatgccaggggaaagccgctgggcctgctccgccctccaattaacccattttatctgagaggctggaaaggaagaaggtacaaggccaggggctcagctatgaaaacatgttctgaatgggataaaaacagcagtgggaagcctctgtcttatataaataaatagtagatgttaaagt

SEQ ID NO: 749 - DNA, 909 bp, Homo sapiens
  misc_feature 9, 13, 15, 43, 77, 78, 98, 111, 147, 157, 289, 513, 519,555, 639, 654, 657, 661, 693, 736, 753, 775, 784, 787, 789,793, 803, 818, 824, 826, 828, 863, 870, 871, 873, 877, 879,881, 882, 892: n = A,T,C or G
gtagaactnaacntngcggttgaggacaaaactcttcgcgggncttttccaagtggggggaatcgaacgggtattcnnaataaagcttttgatggaancccccccccatgnggaatcggggcatttgaaacaaagaaagggaattgncaccgccaanggtttctttccgggcccgctttggggtgggaagaagggcttatttcggctatttgacttggggcaccaaacaagaacaaaatcggcttgcttcttgaatgcccgccccgtgtttcccgggcttgtcaaccgncaaaggggccgcccggtttctttttttttcaaagaaaacgaaccttgtcccggggtgcccttgaaatgaaacttgcaagggacgaagggcaagccgccgggctatcgttggggttggccacagacggggccgtttccttgcgcaactgtgctcgaaccgttgtcacttgaagccggggaaggggactgggcttgctattgggggccgaaaatggccggggcaangatctnctgtcaatctcacctttgctcctgcccgagaaaagnacccatcatgggcttgatggcaaatagcggcgggcttgcaatacgcttggatcccggcttaccttggcccattcgaaccacccnaagccgaaaacaatnggnattngaagccggaccaccgttaccttcgggaatggnaaccccggtctttgtccaaattcaggaatgatttctgggaacnaaaaaaaacaaattaangggggctttgcgccaagccccnaaaattggnttngnccanggctttaaangggggccgccaatgncccccnanangggcgaagggaatttttcgtcgtggaaccccattnggcgaanngncccngncnntttttccaanaattaaatgggggggga

SEQ ID NO: 750 - DNA, 342 bp, Homo sapiens
aggactgggtggaggctatgtccgcctcccctggaagccctcaaggacccacagaagtctcgagcctgccagtgtgcagcgggggacacagatccgccctctgcaccgggagcatcatgtgaagtctaagaaagccctgcaggaccagccgtctcacacttgtcgtggaaaatcccatcagcacacctctgactcccacgtgggaatcaccaggccatcaccatcaaaccgccctcccgcaggcaaaaacggcaaacgcagccctcccatgctcaagggaggtctcatcgctctgccatagtcctcacaaatctccaaatacaaccaagatgtgtctccccc

SEQ ID NO: 751 - DNA, 216 bp, Homo sapiens
  misc_feature 34, 68, 73, 122: n = A,T,C or G
gaactgagagacaggatcttgctttgtcacccanggtggagtgcggcagcacaatcatagctcactgnaaccncgaacttctaggcttaagtgatccttttgacttaacctccagaacaggnttttaagtcatgtgcaaagaacttacttctccatactggaagtagaagtttctcaaaaatttaaaagcaaataaacttatacgtaatttacttc

SEQ ID NO: 752 - DNA, 875 bp, Homo sapiens
  misc_feature 30, 96, 107, 121, 149, 265, 378, 538, 592, 601, 646, 667,686, 696, 724, 729, 755, 767, 771, 805, 816, 823, 829, 846,849, 851, 852, 853, 854, 859: n = A,T,C or G
ctcgcggttgagggacaaaactctttcgcnggcttttcaagtgggggggatcgacgggtattcgaataagcttttgatgaaacccgccccccattngggaatcgggnccatttgaacaaanaatgggaatttggcaccccaggtttctnccggcccgctttggggttgggaagaaggctattcggctattgacttgggggcacaaacaagacaaatcgggcttgctcttgatgcccgcccgtgttccgggcttgtcaaccgcaangggggccgccccgggttcttttttgtcaaagacccgaccttgtcccggtgcccttgaatgaaacttgcaagggacgaaggcaagccgccgggctattcgtgggcttggccacngacggggccgttcctttgccgccaagcttgtgctccgacgtttgtcacttgaaagccggggaaaggggacttgggcttgctatttggggccgaaaagtgcccggggggcaaggatctccttgtcatctcacctttgctccttgcccgaagaaaagtaatnccatcatgggcttgaatgccaattgcgggcgggcttgcataacccctttgaatnccggcttanccttggcccattcgaaccacccaagccgaaaacaatttgcatttngagccgaagcaccgttacttntggatgggaagcccggtcnttggtccaancaaggaatgaatcttgggaccaaaaaancaatnaagggggcttttgcggcccaaccccnaaattgtttcgnccanggcttcaaaggggccgccattgcccccaacgggngaaaggaaatnttcgtcntggaancccaattgggggaaagnccncnnnnctttnccaaaaattaaatggg

SEQ ID NO: 753 - DNA, 746 bp, Homo sapiens
  misc_feature 7, 10, 12, 35, 72, 86, 95, 100, 102, 105, 109, 154, 173,184, 195, 197, 201, 204, 558, 595, 607, 649, 674, 675, 676,685, 689, 712, 718, 719, 722: n = A,T,C or G
tctattngcntntgcaaacatgggatttcaaaccngcttggggggcctttcttggactgggttcaaaccccnaaaaagccaagggngggggaatnaccantnttnaccnaagctgggttgggcattttcccaaatttcttgggaaagaaccccnaagaaccaaaaatttccgnggagaaccttnattgaacccanancccnttnggaaataaccggggcctttcggggggcccttgaagcttgggaagaagtttgatgggcaaaggtcttcaagtcaaagggcacttcaagcttcaaaaataccaccaccacctggtttgccattattaagaagcttgggaaattaaggcaaaatatgggaccagggaaatcttgaaatttcttgtgtttgggaaatttgatgaagggtcaaaaagtcaaaccaaaatttcttgaaagacgcttgtcaggaagggtaagaaaagaaaaggtatcaagcacacttgatcaagccagcctaacttgaaagatgatgtattggaaaggggaagttgggagtttgtttgaaaacccaagggngtccatgatccctccccacttggacctttttttaaanaaaaattcttgnggccccgccattggtatttaaaaatcctcgccattcaagtcnttccttgcaaaaaaaaaagggcccnnnggggggccnattngggggttggggggttaaccaggngtgggnnttnttttaaaaaagggggggggggggg

SEQ ID NO: 754 - DNA, 349 bp, Homo sapiens
  misc_feature 67, 78, 79, 80, 83, 101, 125, 168, 191, 195, 221, 276, 282: n = A,T,C or G
gctacctgcaagaagtcagaacttgagctcaagaaggaaaatcaactgggtggaccccggggccttnccccacacttnnnccnaaagaaaattggcccccncccctttgggaaagcgccaaaccnatgggggcctttcattcttttattgccaccaagacattagggnttcaactttcccgcttggccttnaccnttaagaatcattaagaatgccctaanaatgggaggggcgaatggaccattaaaagctagctcttccttttcctcggtgggncttggngggaaagtgacctttttgaaagtaaacccagcaaagtaagcattcatcccaaccaaaagtggggatt

SEQ ID NO: 755 - DNA, 275 bp, Homo sapiens
  misc_feature 94, 177: n = A,T,C or G
atctttcagccttgtgtgtcatctgcaaatctgaaccaagaaacaggcattctctttagaagaaaaatgtataggaagcctgctcagaggaagngaggtgctccagatgacctctggaagtccctgccaggcttatgttttgaattttctgtaacattttattatgtaaaacagacncattagctatgtttactcaggcacatggaagaagattgagacaattacctaaaaattcactgtgacttttcagtaaatgttattaaagaaaaagtggg

SEQ ID NO: 756 - DNA, 768 bp, Homo sapiens
  misc_feature 68, 618, 632, 635, 637, 638, 639, 640, 641, 642, 643, 644,645, 646, 647, 648, 649, 650, 651, 652, 653, 654, 655, 656,657, 658, 659, 660, 661, 662, 663, 664, 665, 666, 667, 668,669, 670, 671, 672, 673, 674, 675, 676, 678, 681, 701: n = A,T,C or G
  misc_feature 713, 727, 738, 747: n = A,T,C or G
atggagtctcgctctgttggcccagggctgggaagtccagtgggcacgaatctttgggcttcggttgnaacctttcaactttccggggtttcaaaggcgaatttttcttggctttaagccctcccgaagtggggccggggaactacagaaagaacaaggcttgaaatgggtttccaagtcttttcaagtcctggctccttgggccaaacaacttgggacctcttcaaaaagtctaagccaaactccttcttccaagccgcctttgataaaacaaaccccctcatgcttgggaaaccacaagcaagtgggggcttgtttttctccctcatgcaccccaagggaaagcctctcctcttttgccttggggctttctttcccaagggccttaagcttgccaaacccattttacacccattgccgaaagcccaagtcaagtcaccttgaaagaaaaagggaagactcacaagaaagggcccaaagatgaaaaagactctttaaatccttggggggctttttgaagtttttggtttttaagcaagggaaagaccttatttttaaaaaacaaaattggttacacaagaaaattttgccaagtttaccaggaacaagatggaaatnaaaggacatttatnggncnnnnnnnnnnnnnnnnnnnnnnnnnnnnnnnnnnnnnnnngnaangggggggggggggggggggnttttttttttgngggtttttaaaaangggggggtttnttttttttnaaaaagggggggggggggggg

SEQ ID NO: 757 - DNA, 612 bp, Homo sapiens
  misc_feature 19, 26, 470, 527, 539, 566, 575, 580, 590: n = A,T,C or G
ttctttgactgccactttngcagggncctcaatcacttcctttgggcctcctggtatggggtggatgccctccacttaagttctggcccgatgtgctgtaagcagaagtaacgtgtagcacttccaggaaatctctttataagacagttgtcagatgccagtttttttccccttccactgcattattactgccaggttcatagccattctgaggatttcagaaggctgatctctggagaactgaggggttcgaaagattgacttctcaggagcagggctgagaatggaatgggcccttaatacctgacagtttcccaagccctgatgacacaaagccagtgtaattaattcagaacataaggcttctgattccattactgactcatcatcagtaagtggcagcagcagcagaaagtcacttaagcttcttgtgatcatggcaccgtgatgggcatcttgcatgctcctgnctgctgacaatggcacatatctgcagtgacgtgggccgctttggaaagtgagtagcntggggttagggnctttaaaaaatgggggtgggatgcagntttgcaaangctgngggtagaagnacccctgggtgaaacaactttc

SEQ ID NO: 758 - DNA, 139 bp, Homo sapiens
  misc_feature 22, 24, 31, 34, 66, 79: n = A,T,C or G
ccgaagcacactgagatgcgcngnctggacnagnctatcgtggatggaaatgggagttggtggaanagagtcactctgntgctgctggccgtacaagatcgctttccccaaggaaataaattacatttcattctctatt

SEQ ID NO: 759 - DNA, 388 bp, Homo sapiens
  misc_feature 34, 59, 75, 78, 90, 102, 120, 123, 136, 139, 160, 162, 166,175, 182, 197, 206, 250, 261, 268, 291, 299, 300, 334, 369: n = A,T,C or G
acactgaggcagtgggagagctggaggagcctgntacaaacctcagcccattagcatcncccagctctgtctttnganaagatgactganaggaaggtggtnttgagaaaacaaagcatncancctttgtgaagcnganccttaaggtcccctctccagncntggntgaccccanaccctcnttttcttctctggcntccaacttnaaggattggcctgtttccctttaactatagctaccactcagctnactcgctgaanaaggcanagcccacgcctcctggcacaagnttcccttnngctacctaaggcaagcgaatgagtctttttcatngtaatgaactgtatttcccttcttttggaaaaccnggggggtaaacaaataata

SEQ ID NO: 760 - DNA, 178 bp, Homo sapiens
  misc_feature 19, 21, 34, 37, 47, 68, 100, 110, 113, 123: n = A,T,C or G
ttgcacaagttggttattncncaggtggaccccnttnaaaagatggnttttaaaaggaatggaccaanaattattttggattggaaaagaatggggcccnaaccaaaggnggnttaccttggnttaccccttcttaaaataaaaaggttttcattcaccttaggttttcacccattgg

SEQ ID NO: 761 - DNA, 586 bp, Homo sapiens
  misc_feature 2, 8, 15, 19, 30, 36, 49, 108, 131, 468, 519, 525, 563: n = A,T,C or G
cngaactngaggaancagngttcttagttnggaatngggggaaagttcnttcaccaacccagggctttatttccccccccccaaggaatctttattgctttctttaangggccccgggcttcactttcccngggaggaacttgaagaatgggcttggaaaaaatggaaagaaacagggggaaaactttgggaccccagaagacattacttcaggagggaaaagaaacgcttgttgttgaaagggcgggagggccaagaagggtcaagggggggattcatctattgaagccaccaagacttgccacaagacttgccaagccaaccctcaccaagaagccagggaagaagaggcaccaaggggcaagaagtctacctcatacccctcaagaaagggaggtcaaaccgggtgcttgataccttggatttcttgacctttacctttcaagaaacttgtggaagacaaataanatttctattgtgtaaggccaaaaaaaaaaagggggcccgggggggggccanttcagnttgggggacttaaccagggttgaaactttgtttaaaanggggggggggggggggccccccc

SEQ ID NO: 762 - DNA, 572 bp, Homo sapiens
  misc_feature 14, 30, 43, 52, 67, 78, 82, 97, 99, 111, 120, 125, 403, 421,424, 437, 500, 505, 526, 551, 552, 559: n = A,T,C or G
tgagctcctgcagnagtagaactgaactcntcatattccaganctcaagctnccaccatcatgcagnaagggctctancccnctctacgatgctacngncaacaggatctncaggccacngctcnggcccaggtactcacatcagtggttctatcaacactcaggacagacccatagaagaggcccaagcaggccctggaagtgcatgtggaggccaccaggcaaggaattctggagtcccagatcatatctgggtgtccatcagcatgttacttcacatctctgtacctcagtttattcatctttcaaatggaagcaacatatagagctgccttatagagttgctctgggtattagatgtataatatatgtgaactgcttggtactgggcctggtatatggnatgtgctcaataaatganagntggttattattgncatttattatcatcatcatcatcatcataattaaatattattccaagccacaatgtggttctnatagncaacaattatttaataaatgnaaccttttccaaacttccgatctgnnaaatttnaaaaaatattttc

SEQ ID NO: 763 - DNA, 544 bp, Homo sapiens
  misc_feature 19, 401, 403, 420, 424, 425, 434, 444, 455, 498, 503, 527: n = A,T,C or G
gcagcctgcattaacgagnctgagatcaagtgaaatccaatgacatcaataatcctgaatttcttcttcacactcactcatgaaaagtctccgattttcccaccttgctcagccaccttaagtgccttccttcaagatatttcctactgcttctaaagaggatctcccattggcttgggagcagcgtgagaagagacttgtacacagagaggctgggcaacttgtacatggttgcacagatgtccagaggcagtgctgagatgtgaacacaggaagactggattcagcatctgtgctactaaccaggacactatgaagtctctcatacctgtggtactaggaaaatcagagaaaatttcaaggagggtggggcattagaagctgactatggaggaacccgnangagattgattttttggnaaannaaagggccnggcctttgcnggtaaaaaaangggagtgttttctggatgccaacacatttggggcgggcctaanatcangaatagatgggctggatcttcagnatggacttaaggttctg

SEQ ID NO: 764 - DNA, 658 bp, Homo sapiens
  misc_feature 14, 17, 109, 473, 475, 479, 498, 521, 528, 530, 536, 560,566, 609, 613, 624, 629, 637: n = A,T,C or G
ggctacctgcattnggngactgagatgggagaaaaatgagttcaatcagtagactcccatgaccctttcaaggtgacccatcattctttttccagaaagtggcagcttncttattttgggataagcgacgacagacgagaaaccacaaagaatctgcagacgcgagactccctgacctgcagatatacagccatctccaataagtctacatttaaactaaaacttctcctgttgagcaagcataatgtggaattatgttagcaagaccttatgcactcccacaaattttctcccaataaaaaaaactgttatcaaaggattgtcacccccccagacatacagcactgcagggaaaaaggagcccagacagccgttgggagttgacctctggccgcacgcctggggtcagtggagatctatgttgactttatctgtgtgccctttaaggaggcctcttgcttaaaataactaangngccnctaaattacacttacttgnaatgctggattaatggattcttntacaaangntgaaanacctgggcttttggccttcatgancctaantttaactaccatgaagcttctgaatctctacccatttggggtnactnccttttggggnaaaanaagaggtntatcaataagcctttttgagc

SEQ ID NO: 765 - DNA, 658 bp, Homo sapiens
  misc_feature 17, 34, 37, 40, 495, 511, 522, 556, 560, 591, 611, 618, 632: n = A,T,C or G
ggctcctgcatcggtanactgagtagtgtctagnagncanaaagacagtctcctgctggctttgatggaaagagcaaccaggaatgagttctacagctgcaaggaagtgaattctgccaacaaccaccagagcatggaagagaaccctgaggcttatatgaaactgcagcccctgtcaaaactgattacagacttagaagaccctgagaagagaactaagttctttctgcattcctgacccacaaaactccaaggcccgatagctctgggaaagcagaacttggccttttccaaaaattttctgcccttggttttggggatcatttgggcaagcccgaggtgctgtgcatgggggctcctggaatcctgagaagggcagaaagccttggccccagactcatcgtgcagcagctctgagcagtatttcggctgaggagtgacttcaagtgaatattcagctgaggagtccttggccacgtgtcacaaccctacttnttgggggcctgggggnaaaaggcggcntaaaaaggttccaagggcccaacttggaaatggnctgnattgcttgggtcacaccaggcggtaatttanccttcttttgagctggtaancgcctgnctctgaggctgggngagaaaaatatcacaagggcccaaag

SEQ ID NO: 766 - DNA, 507 bp, Homo sapiens
  misc_feature 91, 101, 151, 189, 198, 208, 232, 242, 359, 362, 369, 397,404, 406, 416, 419, 420, 431, 443, 477: n = A,T,C or G
gttggctttgtagaagaaatgatgtcctggaaaattgctttgaattgtaccatctcagaagtggggaaaaaaaaaaggttcttcatttaanaggtagccgngagcacacatttaacccatacccggaacaacatgaagctctgggagtcanaatgccttcggctgatattatttatggaagcccaccanatgtttttntcaatcccanaagccagggctgctgaaatacctnttcacataanaatgcacctacatcaggagcacagccaaaacctcagtgaaacatgcctttcactgattgctttctgcgggggtaaactcccgcaaaggacaaacccaggacagtgagcgggtgtgtntgnttgtttntaaaaaaaccgggggctcccgggatttnggttctntnccttggaagngcnncccctgccttntttttaaaaagnggttaaatgatgttaaagacttgcctttgactgngggttgaaccaggtgtccatgccatttctc

SEQ ID NO: 767 - DNA, 186 bp, Homo sapiens
gtgaagaaatgagccatagagaaggacttgcccaagatcacacagcaggcagagccgggacatgaaactaagcattctggctccagagtccacgtttttaactcaacggaatactcagcaatggctgagtctacgccctgtcgtcccctcctgggtctcacagaatggaaataaatgtctcaactc

SEQ ID NO: 768 - DNA, 225 bp, Homo sapiens
  misc_feature 205, 206, 207, 212: n = A,T,C or G
atgaggcccagagaagctgactgactcaaccagtgtcacactatagtcgtaaaaccagaactatcttatgtagtcactaatttatgaacagcttgggtatctgaagtttaagccagctgtttaaaacagaacgaaatgttctatggtattaacatataagtgttaattaattaaattaccagactacatacacaccaaaaaaaannngggcngggggggccaatt

SEQ ID NO: 769 - DNA, 290 bp, Homo sapiens
gcaacaacggtcacatcctttcccttctgtgtctcagccacagtgtgggtgtgaacaagaaacccaagcagcatcctcatcctatctgcagctacgatgaggactccaacacttcctcaaccacatgaccactcggattcaggtgctaaagaagcacttgtttaaaatagctaaattgtggctcctgaattagctatgccaactattttcagttacaagtcttcacaatattttattaaagtattaagtcaatgattaacactgagaataaaaaaatatttgccctttct

SEQ ID NO: 770 - DNA, 524 bp, Homo sapiens
  misc_feature 377, 403, 415, 416, 440, 456, 483: n = A,T,C or G
gtcagacctggagaagtgcggagacaatggtggggaaagccccttacaaaaccatcagatctcgtgagaactcatccacatcacaagaacagcatgaagaaacggaacaaggggaatgcaatctcacaggatggaaataacctgtggtgaattgttgccatccagatccacttttaagtccacatggttcattcattttggactagatcctggtacagcccagtgaactgatattcttgaaatcaggcacagaggctctgaagtaatgcattacatttgcatccatgatttgcttaaaatgttccatttagcctttcctcccaggaaacaaagccagcagtatttgattattgaatagctcgttttggatgcttaantttggaaaaaatttttttaaaatttngggaaacttggnnttttacaaaatgaatcatgagttntttttcaagttttganttggctccaagggttgaaataacttanaagtctaggatcattatatattagctctattttacatgctc

SEQ ID NO: 771 - DNA, 173 bp, Homo sapiens
  misc_feature 35, 40, 45, 58, 65, 66, 70, 71, 73, 77, 87: n = A,T,C or G
ggccagacctctgcagaagtggtgtcaatcacttnactcntttcnttagcctactggnccccccnnttannancccnaaaaactttnccaaaggaaatcaaactacagaacagcaacaaactcaaaaaattaacatttggcttttgtgttattaaaatattttctcagcagac

SEQ ID NO: 772 - DNA, 548 bp, Homo sapiens
  misc_feature 453, 454, 455, 456, 457, 458, 459, 460, 461, 462, 463, 464,465, 466, 467, 468, 469, 470, 471, 472, 473, 474, 475, 476,477, 478, 479, 480, 481, 482, 483, 484, 485, 486, 508, 516,528, 529: n = A,T,C or G
gctccttcatccccaaacaggaactgctgcaaggcccgcagcagccatgggtgagtggctctggagatggggtaagtggcctacgcaccccagaggaacagctggcagcctagtcttcgggcagcagctccactcagccctggggaatgacagatacagacaaccagttatgccagtgaagtgccctaaactagagatagctggggcgctgtcagccaccttaacagtgagaagaagcaacaggatgaagtggaaacagcgtcacacagatggagcctcgaatcccagcatgctagccatgtgtcatcttcatagtcttcctaacgtctgtggcctcagatgccacatcagtaaatggcacaccatatgtgatttaggctaagggcctgagtgtaataagttgcttaagaattatagcccttcttaaataaatggagaaacagtccatgtttnnnnnnnnnnnnnnnnnnnnnnnnnnnnnnnnnnggggggggggggggcctttttntttgggtntaaaccgggttnnttttttaaaaagggggggg

SEQ ID NO: 773 - DNA, 532 bp, Homo sapiens
  misc_feature 364, 366, 374, 391, 402, 424, 471, 478, 482: n = A,T,C or G
cagcgcctggcagtctgcatcatttcgccacagtgtgaaaccattggctgatgtataaagtggaagccccaggaacctctcaaggcccagcttcagcctcaccttccctgtggtcttcttcaagcagacccataccaagctctctgtgctttggaaactgccagtgaggtgaagtggggaggcatcggagcgacagccacgttgtatgcctgctgcacgagccagaccgcaggacaatactcaatgagaggcaccaacatccatcctggctgagctgatgatggtgagaggccacagagccatgaaaatgacttggagcagcctccatgtattcctcagggttgaatcattgtgtgcaccacanancaattttntttttttaaaaaaaagntaaacacttgngaaaaaaagggggtagggcccnttccttgttttgaccaaggaacaaatgcaaaccagaccctgcttctntcaccangcanaagcttgctctttcaattcagagatatcttcaaggacccaattatgctcg

SEQ ID NO: 774 - DNA, 8 bp, Homo sapiens
gcaagaag

SEQ ID NO: 775 - DNA, 180 bp, Homo sapiens
  misc_feature 9, 48, 51: n = A,T,C or G
ccccctgcncatgaagaagcccatctgtggtaggagagagtgatgccnacncaccagagaaaagaaacgagagagaaagcagagagacagagacagagagagcgagcattctgaaggccagctccccttcccctgtgcttcccaggtcctgtgcttgccaataaactgccctttttcttc

SEQ ID NO: 776 - DNA, 121 bp, Homo sapiens
aatatgttgaatcctaattaccaactcgatagtattaggagatgggacctttgagaagtgattaggttataaggatggagccctcatggaccggattaatggaaagagaagaaaagaaaag

SEQ ID NO: 777 - DNA, 462 bp, Homo sapiens
  misc_feature 328, 337, 340, 342, 355, 358, 365, 366, 410: n = A,T,C or G
ggctgggcgacacctctgctccactgacaacagcctatcccaggcccatggtgcacccctccagcatgcaggagaagggaatgcctcctgactgaccaaggaagccacctgcaatctctctccagacctcccgcctttctggtccctgggctccctgtgacctgtttcccaagtcctcccctccagggcttaagagggaagaagaagtgacataggacagtcctccccacggcagcctgaaaggacctttgtgcagaggccagcatccagagcaggacaacctcagtgaggcttcctcccaactccccctttaccacaaaagcccttnagcaagctnggncntttaaaataacanaanccccaanntggaaggggcccttgaagtcattatggaacatcctcagatcaanaaatgaggcaaaggtatttggggaaataaaagctcaagaggggcggaaagta

SEQ ID NO: 778 - DNA, 341 bp, Homo sapiens
  misc_feature 18, 280, 281, 282, 283, 284, 289, 291, 292, 295, 298, 300,303, 304, 308, 314, 315, 325: n = A,T,C or G
catctgcattaagcgcantgaggctacatgtacacagttgtgcagctgaagagaccaaccagagctggaatccagcctacattccagtcaccacgcatgtatccggacataaagggagtactttttcctaatcattaagactcaatatgagctagtgggagatatgactgaagtcatgacccaatctaaattaacatcattatataatcaactgcattaactaaaaatggcaagtatacagcctcaaatcaataaaggatgtatgcaaaaaaaaaaaggnnnnnggggncnnttnagntnggnnttanccaggnngaacttgttnaaaagggggggggggg

SEQ ID NO: 779 - DNA, 523 bp, Homo sapiens
  misc_feature 390, 410, 415, 417, 421, 439, 444: n = A,T,C or G
gaactgaggaaagagaagccagctctataatttcacaaagtctccccaccttactcatctcgagtagtgaccaccgtgaatggtcccaccgccagcctcttgggaggcagccggggaaagcactccatcctgggacttaggagcatgaactctggagaaacacagacctgtgttcaaatccgagtccactgcgtcctcacaatgtgatcttggacacagatccaatgtgcacagcaaggcattcaaatagcacaaaggctagatcctccaaaggaatttcgccttcagctctgactcccagttccccagtttacctgtctggagccaccatttagaagcttatgtatataaagaattgctgacacagagacacgaagtgagcatttgctngttggggaaaaaaggggccntaatntntttnaccaggaattgccacaanccttnaattttgtaaaacaaggcccaacaaaacaaggtatgcggaagcagtccaggcagtacaatcagccaaaactgattatga

SEQ ID NO: 780 - DNA, 507 bp, Homo sapiens
  misc_feature 382, 390, 395, 404, 421, 425, 448, 491: n = A,T,C or G
agaactgagcacctctgctgattgtggtggcttacccaaggcatatccagatcctcattcccaaggaatctcagtccctggtcccctgctgctgcatttaaccacttatcatcaataacaaacaagggagtatgaagaatgaattccttgcgtgacaaacatttttctccctgcccattgtgcaacagaagtgacacttcctccagatattcagggttaattacctctgctagaattgtgacttgaattactgttttaagccaactcattctttaatcaagttcagacttttgcctcattcattcgctgattgttacagaggtgtaagttcagaggttgccatctagccttcctcactacaatagctttaatccacaggccnaggaaccncgtgngaaaaaatnggctgggttcccaaagngggntttttccaactatcattcaggcnctggaaaaaaggacttctgactgagtctgggaacccgatggcncattgcaatttaaaag

SEQ ID NO: 781 - DNA, 478 bp, Homo sapiens
  misc_feature 378, 387, 404, 408, 415, 419, 433, 446: n = A,T,C or G
cagccggaatgatgctctgaagaccttgttggacagtgcactcttcactcaaacctgcagcagatggaatgatgctctgaagaccttgttggacagtgcactcttcactcaaacctgcagcagctggaacgatgctctgaagaccgtgttggaccatgcactcttcactcaaacctgcagggctcccgcatctcttctggagcagaagcccacctgccagctcatcccgactgtgctgctgcctcctcttccccactggctcagccatccatcaggccttgtgcatgcagctggccagctccctctccagggaacacttttcccctgcatctacttggccaacttcctgatctcttttaactcattcaccttctcaangggacagantaacgctttggggactnaagnccaacantctngacccatctccaangtttctatccctngttggctcctacaggacataccctatttgctt

SEQ ID NO: 782 - DNA, 491 bp, Homo sapiens
  misc_feature 335, 341, 343, 389, 395, 396, 403, 432: n = A,T,C or G
gaggatgcagcactggccccacagcgcccacatcctggctctggaaacactcggtctcctgattcagtgaggctacacggaagcatgaggcccagctttgggacaactatgacatctgcaaggctgcaaagaggttttagggcgagctccaggctggtctctgcggccaactgactgtgcgtcacggttcaggagtccctgcagtagccacagccgtgctcctgtaaaacgtttgtgggtcctatgtttacattctctgactctgaaaccatcgatgtcaccaaacacactcctgttggcctgtgtttaacacaatccaattcagacacatgaanatgatnangtgtggggtgccaagctgaaagtgctactttcagtttggtaaaagnaaaatnntaaaagnactaactttaacatcccaaaaaattattnttataccaaaaacatttttagagattgaagaacagtataaaaccttttcctgttcactg

SEQ ID NO: 783 - DNA, 193 bp, Homo sapiens
cctcaggtggtcgctggaggatgaagatgtgtctgaggctgactgagatgagctaatggcctgctgcccaccagatacaagaatgagctccagccaagaccagaagaacatcccccctgcccaagcgcagccaaggtcaacagaactgaccacatgacccatggactcgtgagaaataaattatggttgctgt

SEQ ID NO: 784 - DNA, 537 bp, Homo sapiens
  misc_feature 27, 29, 380, 383, 389, 408, 412, 420, 443: n = A,T,C or G
acgcctgactgaggctgtacaagatgngnggtgccagcatctgcttctggggacagcctcaggaatctttcaatcatggaagaagtgctccccctggaaatcagagaactgtgtgtatagaagatggaagatgagagagatatggaagtgttattatgatggaagtagaaatgtctgagaaagtgaagatctagaggctcaaaagttgcctggagactctagactggagaagaaatggaagtatagagaggttgaccagctcaaatcactctctcaggaagcttcagagctgagatccaagctccagggtacttggcttcaaggccagagccactggtctagagtgccatagattagagctaggtatttatgggaaatgnggnattctntaaaatggtcaccaggganaaancttttggngggaaaaaaatttgacctccctnatcctctccacaatctctttaacatctcatatctggcatggccacacagttcaaggcattcaaacgattgccttcatgggtttcttgctgatgg

SEQ ID NO: 785 - DNA, 241 bp, Homo sapiens
ctgttatcctcctatttgtaaaacggaggcacctgggacccagctccagcaaggagagtgaggatccgactccaggaggcacctcaggaccaaaggcctcaaggccaacaccttccacggcacaagccccacagggctgcaggacccgtacaagcagcggaccatccctttctcttcttgactatgttttcccctgatgctttgctttccacatagaagagttttccattttcgtggggtc

SEQ ID NO: 786 - DNA, 308 bp, Homo sapiens
aactgaggagggaaatttggacatggacacatagggaagacagccatgtggagacagaggcagaggtggacctgctgccgcaaaaccacagggcgccaagtactgtgggccactgagaaaactaaaggagaggaaggattcttccctggagctttggagagggtgcggccctactttcacctggatttcagacttcagacttccagaaccatgaaggaataagctctctttgtttcaaaaccactcagtcaaggcactttgttacaacagcctaggaaactaatacaggaattggtattagtaaaatc

SEQ ID NO: 787 - DNA, 377 bp, Homo sapiens
aactgagcatctgcctcctgtgtcccctctttccctgttgtacggctaacaccagatcccagtctcttcagtggcactcaactttttcaagtcacaagatggaagcgctttggaagaggagtaaaggacctggactctgattccatgccaccgcaaactcgggcaggcacttcaaagcagagagtctcattttccacttctgaaaaacacatggtctagatgagctctaagtcctttgcactcaataatttcacagtcttttttattattaatattattttcaattgaaaaatcataattgtatatttatggggtacaatgtgatgttttgatatatgtattcaataaggaattattaaatcaagataattaacatt

SEQ ID NO: 788 - DNA, 208 bp, Homo sapiens
gtaagcagacctctcctgtgatgttctggatatgcctgtctcaacagatttcagggtggccgtcttctctgcaaattcagttctctgatgtgtccaagccttttcctgcctataaatccagcctcttctcaactcaacagaacattcaattttatagaatgaggtgttgcctcattctagaaccacaataaaagccaatttgatcttt

SEQ ID NO: 789 - DNA, 523 bp, Homo sapiens
  misc_feature 369, 380, 393, 395, 399, 412, 429, 477, 483: n = A,T,C or G
agtagactgaggcccaaaatgcatggcacagggaagggtttgacaactttttgatggatgaacaaagaagattcaagccacttgtcaacaagctcaaagtgattgaaagtggaagcatttacccacacgctcatgcagaaaatgacaggaaatcatccagagacacttgtgacagagatgagaactgtcactgttgagaggtgctgcggagatgggtgtccacggatgaccgttcggaggccgacttcggggatgtggccccattagctcaagagtgggtgactccctaccacactgatggcgttggccaggacaggacaagcctactgcagtgacacagtgtcactgatccctgatgcccacgtgggnggtttactttnactaaagccgggnanaaanattgcaacaaganaattgaggccccagcgntgagcagcccaatcacctggttgtaagcagcgaagtgttttttggctntgctcntgggccccaaaccactgtgggctcacgaaagaatctttca

SEQ ID NO: 790 - DNA, 501 bp, Homo sapiens
  misc_feature 367, 383, 384, 394, 413, 422, 435, 455, 463: n = A,T,C or G
aatttatttgactccaagtccttgatcaggaagacaactcctaaagataacaatcttcctaaaggaaaatgggactgttttacaaggagccacagaatggtggatctgagaatccaacatagggaaacccactgcttcatctaccattatgcgcttgtatatgcatgacttcagggataaatgggagccagaagtacaaaggaatcttcagtagtagacaaaacgcagaacccttcacggtttgaccagggtcattgtgtgtctgcctggtcatttgaccagctcttacgaatcaggaacccagctgaacctcagttgaaccagcccctccaacagaactgaggggatttggggctgataagctcantgctatgtttacacgnncgcctttttntaaaagttgcagtttttgnaaatggaanctatatttgggtngcatatgatttctataatgnattactgncccacccctgcacatccttcagagaacagtaaccagcc

SEQ ID NO: 791 - DNA, 506 bp, Homo sapiens
  misc_feature 376, 383, 396, 434: n = A,T,C or G
atatttcctccaggagtaatggatgcctgatcatctgagattacatctgcttcacgcatacaaactgcataaggcaatgatgttgcagaggctccacatcatcactcacgttcagaacagacaggagcagcagcaggaaaggaggctggaaattaaatcgtgaacttttggattgtgattttaaaaatatatctgaaattatcatgtacatgaataataacttgtaatagaaatagaaaagataaactcctaagataatgtaaaaagctaaatattttaaatattcatcttttttatggttgagtgaatgtttgatatctcatgttatcttgattatctctgacctctaaatacctggatctccaccccctctatnttcttanatcccctttcccnaaagggaaaagcctgggctttaattggaggaaaataancctaaaagcctggccgataggggaaattttttttctagttttaatttgaatatttatcatcaaactgaactt

SEQ ID NO: 792 - DNA, 421 bp, Homo sapiens
  misc_feature 338, 350, 351, 356, 357, 362, 366, 367, 370, 371, 380, 385,390: n = A,T,C or G
acgggtctgaagaagcaaggactggcaagtctgatcccccactctgattctcattgctgaatgtctgggtcttccttgtgtacctgctggggtgggagactgctcgcagcatacctggcctatgacatgcctagctctctggggtggatcttggacaggaagactgcttctgccagagtaaagaatatgacggagctcctcatccgatggagcctctgggaagaggcgaagagccagctggaagcctggtgggcctccgctgccagcaggacagatgcatcaagtcaggtttatgggagaagtcttcccagaccactatgtccaaacttctgtccatnctgctataaccnntttcnncgttnagtnnggnngaaaaccanaccanttcanccttggccaaaagctgcaaagataagaaccc

SEQ ID NO: 793 - DNA, 361 bp, Homo sapiens
  misc_feature 344: n = A,T,C or G
agaactgagaaaccatgaagttatttggatgatagatacagagatacgctgctcagatgcccctttcaagaaagaacttgctgcctcttgctcaagtttcttcctggagctttcaagcatctttgcagggaagtcacatccttcccagggcagcccgactgaccaagacaccgatacctgaagctatgataaccttcttgtgaccaggagacaacaagcagaaggccaaaaatacccaagaatggcagagcagaaggatggaaggagctgggcttcattataacattggagagtagccagaccaacaactccagcaaccaaataactctgttttctttttaaanggggtattaaatgaccg

SEQ ID NO: 794 - DNA, 316 bp, Homo sapiens
tctggtacaatgcctgtcgtcacataagtctggcttctttatgtgcttgaggaaaaaggattgaaaacgaagatcagaacccagcgcacgacaatgggatcattttttcagacacagcctcctgcttcatggagctctgcccttcctgccggagcaccgacctccgaagccagcacaacagaccctccaggctgcccccagttccttcccctgcccttttgaacttaacattgcctgttagtgctgcctctggatggtctgttaaccttaccatgctttgagtcaaactggactgaagtagacttctggtcaaaac

SEQ ID NO: 795 - DNA, 556 bp, Homo sapiens
  misc_feature 4, 9, 11, 16, 17, 24, 27, 31, 32, 35, 37, 40, 41, 43, 44,48, 53, 54, 59, 64, 71, 80, 84, 88, 99, 105, 180, 255, 280,356, 382, 395, 409, 413, 430, 435, 444, 452, 464, 470, 495,496, 504, 507: n = A,T,C or G
ggcnggtcnanccttnnggttttngcntaannccngnccnncnngttngaaannggggncctcnagaaacnaaaaccatngtancccnttgatcccctnacgggnggtcccaaaaaacaaggaagcttcgaggccatgagcaaaatataccaagcccaagtggaacccaagcttgtcttnccccatctgacccggtggtgcttttgggccattgggcatgttcttcacccgcctggggttcttcgtttaccgaangtcacctctaccaaagtacactcgnggataatctataaaagaactcctcatcttccttaagtgggccctcactcttcatggggcttttgggaaggccctcnttccttgcttggctcttggggttggnaatctaaccgtgnggagcacccccaangggngaaaaaaaccacaaaanggggntttctttgnaaaacccnggcttttttggnaaaaanaacttttttttttaactgggggggnngggaaagnggncccaccctggcttgggtcaataaataaaatggccggaatgtcataagcc

SEQ ID NO: 796 - DNA, 511 bp, Homo sapiens
  misc_feature 102, 345, 352, 360, 378, 381, 388, 392: n = A,T,C or G
attaaaaaaagaaaatgtgaatatgaaagcagagagtgagagtgaagaaggcacaaacagaaggacattgggaacaagcagccgctaatcatcatcataacngactcaggctggatctgagaaaaggaaaaaaagtggataaagagtgtgcacttctgttggggcaatgactccggggcggaagaggctgaaagaaaggaccaatgcagggaggaaaagaaattgcccaactccttccagggaatgtagatgaaaacatatagacacaattgggagaaaatttggggcagctgatctgactatgaactgttttgataagatgaatgaccagaactcccaatactncttgagnagaaaatnttcccctgcccctacaanaanaggctgngaanacactgtttgaactcagaccatcacaaaagaacagtatgattattgactttcaatgagtttcttacaattttatacctaattactatgctggcaataatgattatgtagaccattaaat

SEQ ID NO: 797 - DNA, 511 bp, Homo sapiens
  misc_feature 344, 377, 383, 392, 402, 408, 436: n = A,T,C or G
actgaggtaagaagtctgtaattttgactgagaatgaaaaccctgctgacatgatgatttgtggcagataatgcaactgattccatagagatcgcttgagatcacaagtgatgtgaacaatcaatctgaaaaataaaatttattcaggccatcacttcaagagaacactatgaataggtgctggatctaatgacctttcaatggaatggccacttaattcaatccaggaaatgtttgagagtcaagtagatcaagggagacatttaatgacatggggacaagcatggtaccccagggatattccaggaattgagaccctattgtaccttcaaacctgagattgnatgaattctccactatttggggggcttgggttncctttntctcccctncaaaaaaggnctaaanccatcttgcatagctttaaaatgaaaanctctattagcaaagtttgtaaattaactcttaaaggctcttttcaaggtagattaaaaataagctggaacccttg

SEQ ID NO: 798 - DNA, 525 bp, Homo sapiens
  misc_feature 369, 374, 389, 402, 413, 416: n = A,T,C or G
agaactgaggcttccagggctgtggggccaaatgtgccctctcctgccctcatggcaagcctcagttcctgagttctcatcatttcttccttgctacaatcagaactgagtctagcacccttcaggacaaatccagatccccaggagagacagcctgatgagttcagcttggaaagggtctgttcctgtcctatcagctgtggccagcgtgccagggtcacgtaccagtgcgactgccacagcacggcccatctgtccaggagtagttctcagtcaacgggctccagctgggactcaggctgaatagatgcccacaaggatgtctgctaccacatgtaaagtgccccaaagcaggacaagggctcaacnagggngggccccgtttaatnaagggaattctgngtctgtctganaanaaagtgggcgatgagcaataacaaggcctgtcgtccatctggaagaactccagccaccccccaaactttcaggtgcatagaaccacctggacataagacacaaacattt

SEQ ID NO: 799 - DNA, 321 bp, Homo sapiens
acaaataatctctacagtggacctcaagacttcatactaagattctgaagatgattgagtcaatggatgagtgtaacgaacttttggaaacttcaaggcaattaaaggaaactgcaggaggaccagaaaagatcaagaccagggcacgagggctgatccaaacaacgggggccggcatttgtgatcttgggtagagccaccccagtgtgggtcaactccacagcattaggaaaaccagtttatcagaattaccttctcaagcaatagatctgttccttgtcacattcttagaactaataaagacttatctttattactact

SEQ ID NO: 800 - DNA, 354 bp, Homo sapiens
  misc_feature 16: n = A,T,C or G
actcctgcattaggtncaactgagtttggagatcttccccaatatgcccagtggattctcccaccagggccaggtaaccttcctcaccagaggtgagcatcttgggaaaaagtacatcctgtctttgcccccagaggtgacttcaaagaggcaggtatggtcaagagagacactggaagatggaagttacttcagtgttccagttgctggtgtagccagggcttcacagcgtggaagtatggcatcatgatgtctactgcacatctattcccaaccccatattcagttgtttcatgtagtctcttgaaatctatggaaactagaaaacactacaaataaagccttgatttattg

SEQ ID NO: 801 - DNA, 409 bp, Homo sapiens
atgaagaaagtgaagtccagtaaagatcaagtagacctctcatgtagacagcgggaaagagctaagactagaactcagatctccaaacagctacaacagctctgtttccagcaatgacaagttactggttccaagaatgctcttccttggatctcagcgccttcctcaggaccctctctgcgttcctcacatgctccagtgccacgtgaacaatgaagcttccctgagctggactgcaatccagcaagtggctattctttcaacagtggagactgggcttcgctgccagggaaagtcccattttaagggagaatttgcagtgggccgggactgcgatatcttgtgaccacagaaagatcaaacagggcaccttgagtatgtgagtctatgagttttaccattgaaaaca

SEQ ID NO: 802 - DNA, 399 bp, Homo sapiens
  misc_feature 16, 376: n = A,T,C or G
ggctcctgcttagtcnaactgagatgcagaaacccggcccagggaagacgcagcttgagcaaggtcaccggcagtttcctttgcagtaaaatgggaataaaaagaaaatctacataacagtagatattctgtgaggattacgtgaattcatatttgaagagtgagtagaagggttcctggcacaagctctacaagtgtggctggaatgaatatgatgatgaggatgaagatgaggatggcggggctggagctcaagtgccatactgtgtcctggagcagaagccacgtgttgaggacagtctggacccttaacgagggttgagccaccgacaccagcctgtgactgtttacctcttgagtttgtttacaggagaanaaaataaactctctccctttgtt

SEQ ID NO: 803 - DNA, 292 bp, Homo sapiens
  misc_feature 14, 15: n = A,T,C or G
actcctgattagtnnaactgaggaataactttcttctatcttcaccttcccttttggctacagccttaagaagaagtggcagaaaaacatctgagatgaagagagaccctaggttcctgacatgtccagcctctgagtcatagaggtcatataaaaaagtaagagagagaaaattgtgagagataggctgccctaagagtggaaggcattgaatgttacacacagtttggagtcatttgcagacaatgggtattaacctttagttttggtcatgaataaatagcttattggg

SEQ ID NO: 804 - DNA, 486 bp, Homo sapiens
  misc_feature 362, 367, 368, 369, 372, 376, 377, 385, 396: n = A,T,C or G
gtttgctgcatatggttggcacactgtgcactggacaatggaatgtggctgaccaggcattgggagagatggaaatccaaccccctgaatgctcacaaccgtgcaatctaccattcccctcatgaacggatgcccttgtcctacttactgcatggactagctgcagttctgtgaacataaataagaatttagcactcatggacattgcctcaatggatcaacacaacagcctaataagctgagtcttatttcccagatgaagaaattgaagattataggtgttaagtgacttgctacaatttggaagctagtgagtccaggtgctacagggtaaggaaagcgctgcctatgcgggatgcccnacctnnnggnaaannctttgggnaaaaaaatgancctataaagtcctaggaccaaggcctcctttttgctgtcttctcgtctctcttggaccttcaggcgccccgcttgggtttgttccaagtg

SEQ ID NO: 805 - DNA, 440 bp, Homo sapiens
  misc_feature 172, 373, 381: n = A,T,C or G
agaactgagatgtcaactttttgtaagagtcggatgccgttctttcgctccatcctaatgggcacttggtcatgtgcccagcaacattcactccagaaagggaatctgcttcctgtgcaatagaactctgtctggaacaaccagggagatgttttcatccacatggacaganatttccggcacctactggttttcccacccacactgagtgttgccctctaaatgagtcactctggtttccacagagaggtcaggtgtctctcgggagctggacttcctgaattcactccaccacgttttatctgtgtaaccttgtgcagggtacctaaaatctctgttacctcatctgcaaaatggggatacctaatacttngagaggtngtggtgaaattaaacgcaagggcacttggccaggagcggggcacacgataaatccattg

SEQ ID NO: 806 - DNA, 513 bp, Homo sapiens
  misc_feature 386, 389, 392, 398, 400, 403, 408, 430, 439: n = A,T,C or G
gagtgtgatatggcttggatctgtgtccccaccgaatctcatgtcggaggtggggcctggtggaggtgactggaccagtgtgctttcctgttcttcagattctacaaagagaaacactctgtttcccagacttgcttacagcaagggacttagatcccgccagccagaggcactcccgtgagatgggcagctgtgcaggaggcatctgtcctgccgtgcaatgctcaggcacaaccagttttggagccaacagtcctgacattgactttctatccctcagacgccagccaaggcagtgcgttcctggaatcaacgctctcaatagcagcttcccaatccttggccaaagtgatgtcactcaaagccagcgggtatgacaaaagggnttntcnaccctnanatnggggnaaagttcacagtaccctggggnggctgattntgcagggtgttttttatgcatttctgaaggccaattaatagcccatttctccagctcttccaattattttttta

SEQ ID NO: 807 - DNA, 161 bp, Homo sapiens
ctgagagccaagaacatcagaggtgggatgatgatgcttgtggctatgagacaggatttcaaggatcctgatgaaacgtctgctggcctgtatctgtctgaatgctggaaagggctttgtgttactcgaactgaaaggaaaacataaaatgatgataatgc

SEQ ID NO: 808 - DNA, 488 bp, Homo sapiens
  misc_feature 345, 363, 381, 392, 394, 397, 413: n = A,T,C or G
gaactgaaatggaggaaagatctctcttcacaagacttaacattacatggctgggtgtggtggctgaaacctgtaatccctgcacactgggaagccaaggggaggactgctttagcccaggagtttgagaccagcctggacaacacgtttaggagattatttgaacaagaaccgaaattgctccttttaaatcagaaagcttgacaatatgatggcaatataaacttaccagcaaccatacagacaccaagaagagcccatcgcaacccctggggtgcgcctggaccatccttcctctccgaagccccgtccagtattcttcagctcccaagttcaagtgactgncgagcctcacagactttnaaaaaaacttggttcctntgtgggggccncnctnctttgacctcacattntcaagccgagtgttcattgttgcggttcttgtaatgtttctgcagttctaataaaaacaggagccaaaaaaaaaa

SEQ ID NO: 809 - DNA, 362 bp, Homo sapiens
atttcttgcccaggagtgttcctgcctggcaaacaagatgtgtacctcggggtctacctcatgaatcagtacctggagaccaacagctttccctctgcgttccccattatgattcaggagagcatgagatttgaaaaggtatttgaaagagcagtagatcctggagctgtagtagaccttttggaaaacggagaccctagcaaggcagagacagaagcggctggacatcgagaggagtacattggcactggcagaacgacacggagtttggccggggcagttggaagagagccggggctgccgagtggcccaactccaggggaaaaccatctccctgctggctcccccatctgctgatagct

SEQ ID NO: 810 - DNA, 336 bp, Homo sapiens
cccctggactgatgacgtttgctgtatcaacctgtaaggagaagctctctccggatggctatgggaatgaaagaatccgacttctactctcacacagccaccgtgaaagtcctggagtaaaatgtgctgtgtacagaagagagagaaggaagcaggctggcatgttcactgggctggtgttacgacagagaacctgacagtcactggccagttatcacttcagattacaaatcacacagagcatctgcctgttttcaatcacaagagaacaaaaccaaaatctataaagatattctgaaaatatgacagaatttgacaaataaaagcataaacgtc

SEQ ID NO: 811 - DNA, 527 bp, Homo sapiens
  misc_feature 376, 403, 416, 423, 450, 474: n = A,T,C or G
agaactgagactctttccatgatgagactattcacatcatggcagctgaggactgagatctctttctattgtggatgaaggaagatactgtgtgtcatcagaccaacttcaggcttccattgagtcattgtgcctttacaccaccaccagggaggaaaattacttactttctaccaaggaagcagttaaatcgcaaagctcaataccatgtgatgtgaagactcattttagatcagcccaagaaaaacaccattaagcagagaccgagcctgtggttgaaagatatggagtcacatggcagcggccacacctcctcgaaagctaaatccatgactgggccttggtccccgcaggctcctgcctggcctgccccttnctgtgctgggaaaatgggaaagggacnttggggcaaaatnggagganccctgcctttgacaaggcacatacaangggaaagtctgtcaaaaagcattngttttactttcttttttaaaagaaaaaaaaatactgttatttactgctttacc

SEQ ID NO: 812 - DNA, 398 bp, Homo sapiens
  misc_feature 15, 16: n = A,T,C or G
gctcctgcattagtnnaactgaggaatcccagtgattcaagagtcattccagagaaatacacgactgaagatgactggttacccttctagaaagaggggaacaaggcctccctagttccttttgcttcccagtgaatacaccgaggcagaagagcctttcctagaaaatgtcctgggccattatcttcaaggggcttcagaacttctaagaagtgtaggtatccttttgcaagggaaaatgtatatgccttaacgtaggcgatttttgtggcacctttctcaatgaagaaaaggtgtctttttctccaaactaatttgctaattaacctatcagtcactatttacacatgaaacagaattcactccagattgttcaaatgaaaaacatttataaaagg

SEQ ID NO: 813 - DNA, 348 bp, Homo sapiens
ggttctggttaaagccaaaattccagaaaagacaagtcagcactgcccatggcagggatacagtgtgaaagcaactcaaataacacctgttttttgaagatgccacaggcagagtgttggagccagagggccaagacactgaggaagaagagccaagctactgctataaagaaggagtgtccccttataaatgaagaacaaagaagaaggagaatacattattatctacttataaatcacacagagacacaaaaatagtgaggtagttagtacgtaaaacaggccatatactagctagaaaggcaaagcctactaaagaaaaatatttgaataaaggaaatgggatac

SEQ ID NO: 814 - DNA, 407 bp, Homo sapiens
  misc_feature 5, 365, 386, 390: n = A,T,C or G
gtttnagtgattgggcagaggtgtcatgtgacccaagaccatccaataagccttgactttgggatttttgttggaccgcctgggaaaaagaagctctccttccattggatttgaaatgagcaaggcgtcagtctggatctgcaggtgcctgccctgcggccacatggagagtggctgccgaggactgaagctcacaaggagggaggcagaggacacggatgtggtgagatacggtcctaacagcatcatttgagccctggattcagccctgcctgccttgaaaccaatacataggccccaaatatattatttggaatatatatatttggaatatatattattagaaaccaatatattagaaaccnattttaaaaagcttataaatnggcngtgtttttgtttaatcc

SEQ ID NO: 815 - DNA, 442 bp, Homo sapiens
  misc_feature 99, 369, 381, 426: n = A,T,C or G
ggtaatcactttgatcagtatgaggaaggacacttggaaattgaacaagcgtcacttgacaagcctatagaatcgggagaacagatcccattccaatcnttgtcaagtatgatgtcatgggcatgggtcgcatggaaatggagcttgattatgctgaagatgctaccgaacggcgccgtgtcctagaagtagaaaaagaagacacagaagagctgagacaaaagtacaaggattatgttgacaaagagaaggcaattgccaaagccttggaagacctcagagccaacttttattgtgaactgtgtgataagcaatatcagaaacatcaggaatttgataaccatatcaactcctatgatcatgcccacnagccgagatttnaagatttttaacccagagagagtttgctcaaaatgtcttttcaanatcccgcagggatgag

SEQ ID NO: 816 - DNA, 405 bp, Homo sapiens
  misc_feature 357, 375, 383, 388, 389, 390: n = A,T,C or G
cacttggggcacatgaagactttgtacgaccttttctctgaatggaaaatgaattctcctgcactcagcatatcaaatcctgagagactttcctggaccgactttggccacctcaatttctgaaatgttatactgattacttctttaagatattgtttggcccaaggtcatgtaacatatgagttcattctgtgcatgaagctccccagagaacaacggtacacaatgtcagtttggttatggcatctgaaaactcataagagcagactttcattaaaagcagtattacccccagcccttgccttctgagaattcacatatgaataattaggagtctgtaagtaggggcctacctgngggacaaatttctccccnggtttttngaaannnaaaaagggatttttt

SEQ ID NO: 817 - DNA, 330 bp, Homo sapiens
gtttgggtttcggatttaagctctactagtccagggatcaagtagctgctatggctctgtttcatgccctctcagctctcaggagcgtccagcagcctcagaactggagcaccatgatgacaggaggaaaagacagctgggctgctaagcagcagcagaggggacctcacgtgttataactacacatttgggtgttgctttgtttaatgtctgtctctgccatgaaatgcaagctgtaagggcagagcctgtgtcttttgctcattgttctttcccagcacctggaacactgcatgcacataacaggcccttaataaaaatttggtgaat

SEQ ID NO: 818 - DNA, 363 bp, Homo sapiens
aactgagctggactggcattctatgctcatcctgggtctttctttgtctggttggctgcatttggaaggaccttgctgaacttgacctctggttatgctctgaaactgttctcttaaaaagctaacatggagtggtcctgccagccctggcaatgtctcaccacctgtgcatcagtgccagccaagttggaagataggatggatgcctgcacacttaaatttttaattgttgacatctctaagtctggaagtaattttgtcaataatgtattagagttacatagctagattattctacagtaagtttatggggtatactcagtttatttcattcaataaattgtataataaacacagatcccg

SEQ ID NO: 819 - DNA, 433 bp, Homo sapiens
  misc_feature 381, 393, 397, 398: n = A,T,C or G
agaactgaggttctaatggccaaactggcaaagttcctgctgttgccctcacctccaaggctggtgctcctggactcagggtgtgttccaggtgcctgaagcatggcccacaccagaaaaaggtgctctgtaagggcagaaaccaggtcctcacaccatcggtgcatgataaaaattaactgaccaaataacacggtggtaccctcttcaaggcaacttcggagtcagacatgcctacgttctccttcctgctctgccacatgtgtgaccctggacagggtcctccatcctcttggcctcagtgtctttgccagcaagctgggaataagaatcctgtgtcatggggttgtcataagggggaaatgagatgacctaaagggncattttttaacntaannaaatgcctttcaaagcaaaataaaaaaggggctta

SEQ ID NO: 820 - DNA, 88 bp, Homo sapiens
gcataatttcagagaacctgtaagaaacctcttcaagctattgcaagaaacactcacttctaaaaataaagagaaatctgttttccct

SEQ ID NO: 821 - DNA, 423 bp, Homo sapiens
  misc_feature 32, 35, 37, 38, 42: n = A,T,C or G
gcctatccacagctcttcaaataaagcgctgngangnnagcnaaagtgcaggggctccttgagaactttccagggctaaccagctgctgaggagtggcctccaggaaagagagaagcactctgattcaggcagtgatttacacctaaaataccaactccatcatatcttcagaacaattcttctagaccttgcatctaaatatggagtcgttaactaacaacgaacaaaacctctggatggccgaaggacctaggctatacagaaagctgtgaattaccaatgagaacgcagtgagtcaaaagaataatggaattaaataagttcagaggctttaagtgtttcttaaaacacttatctatgaacccctaatcttagtcatttctggcacagttggtattcataagcatttgatcatcattctg

SEQ ID NO: 822 - DNA, 234 bp, Homo sapiens
ctagttctcttggagatgactgatggcatgaattctacttgcatggagtccccgagaaaccactcctcttcttcaaaaaagtacactaaatctcaggacaaactgggatgaccagttatcactgctgccaaccctgttttgtgaattccatttaagatgtccaactgagaacaaattatgtctcaaataagattgtattcacagaatgatggaactaaagttcttggtaaattt

SEQ ID NO: 823 - DNA, 294 bp, Homo sapiens
gattgaacccaaagctgccattactgcaagaattaatgcttattgccaagaaattcaaataaaggaaactcattggaaatgttcagagaggaaacgatgacagtgataattccaaatatgatgctttctccataaactatccatagagatggcacagctctcgatcaacctttgcctggttggcttgaaatgttttaagtctttgacataaaaattgtgaaaggactcgtcgtttccaaagtgagatgaagattttgttactgctgtttattaaaattttttcgttgtgtttcc

SEQ ID NO: 824 - DNA, 451 bp, Homo sapiens
  misc_feature 406, 430, 432: n = A,T,C or G
cacgtggaaagcaagacccctgagggcgcaggttttagtcaactttcattcagtgccgcttctacagagttgaacactttccggtacattaaatgctctcgttggttcagaaagaacactttgaaaagcctgtgttttgacgtctactcagaagtattggaatcaatgaagagtgggacactgaatctggatcctctctaaggaatcgttttccagaatacatcaaatgttacctgctttgtaaacctctccaattctctcaattccctctgtcatcatttaagcactgaccatcagaccttcctgtacctagacagcagctttctattggattctctgcctcaggcaccgctctcctccattcaaaccttcacaatcattatctctaacgtgaagaccatgccgnctcagggaaccccagaagggatcntngaacctttccaaaaaaaac

SEQ ID NO: 825 - DNA, 404 bp, Homo sapiens
  misc_feature 387: n = A,T,C or G
aacatttaaggaagtttctattttaaaccagccttggagggttttcatgacaaggaattgcacattggatgatcatttctaccttttgcaataactacttcttatttgcaagttgtgtttaagtgaacaaagacaatgataccctgttgagctggtaggtaggaagaaccagcgaagcgcacagttaccggagaggttatttgcccaatgttgagaaacatatgtgtgtattagaaaaaatcacatcgactcccaggaatcctgcaacatactgcaactgtgatgctgaccagaatgagtggagatttcctcatgatttctctgtgtgagatgcagagttatcattccacttgaatctgtgaaaagtgtctgattaaaaatcatacngataattaccatccggg

SEQ ID NO: 826 - DNA, 387 bp, Homo sapiens
  misc_feature 242: n = A,T,C or G
actgaccggaatgataacgacttgcagcgcggtgttgccgtccccaaccacccctgttttctgacaacaagggagcgcgggagaccggagcgctgaacccaaatccctcagcagttgcacttcattaagtcaaaatgtgacaagaagcttagagagcaacttgcagatctgatcacacagaacaatcagggaggaaactttccaggagttggtcgggggtggaggagggaggggagggccanagatgtgtacgtacagggaccaggacatgcacggggtcctgtaccccacctgcccagggcaggtgtcctggctgatgggagcagggaagctgtccctgggtgggatctgggaccctgggatactgggaccccagtgggggcctaa

SEQ ID NO: 827 - DNA, 335 bp, Homo sapiens
gtaatacagcaattcactgtacgatttacaatggtgcattagcaacccggcagcagtgtgatgtcagagcctcaaaaagacgtatgcaagagaagcaactgggcctggttctgctgccctggcccccagtcaaggctgcttaaatgtcaccaactccagtcctgctctgttccacagctagtcctggctgtgattttctcccaaataggacacagatattaactaaggttctgggaagaggaagcaaaagaaagagaaaaagcaaactactgaatgcactaaacatttttttaaagttttattgaaaggaaaatagaggttaacttgaaggaaac

SEQ ID NO: 828 - DNA, 241 bp, Homo sapiens
tgatgcaagatggtcctttctgagcagagctcccctcgctcagtgctcctttgtttcacgtagaagatcttcttgaggggactgtgtggccagtgcagcccaggcctccccaccctgcaccgttcaacagaagagcagctgacgcagggggccctcaacatgctcacccaaaagtcagcgagattctgcaccggcccactagccttccaattgtaaactaaaaataaaatcttggccaggc

SEQ ID NO: 829 - DNA, 419 bp, Homo sapiens
gcagagaaacagatgaaatgactcactgaggagggaagcactgggatgcctcctaacctgggacggcttcctcttctgcagcgtctgtgtttgtcagtgtctcctctggatcaggcaggcctcagacctcactaagctattccactcaactctttcttcccgtgcttcctgactccaaggtatcaggcaaacttgttgatccatttagacttcactctcaccctgcttgtctcttttcttcgcgcacaccagagctacccagaaccgcggtgatgcctttccctggcagggtcaggcctactgtggcagtgtcatgaacctttcctaagcaggatttgtgaagagggcaaaagctggcatcagcaagacatgttttggtttagacgtctcagtagacattgcagcaagttaactattgg

SEQ ID NO: 830 - DNA, 440 bp, Homo sapiens
  misc_feature 385, 392, 417: n = A,T,C or G
gtccttacctgaagcccaaggtgatttttggccgctggcgaccttgtgaccgttggcagtgggtcagatgtggcactcagaattaggggaaggattggtgatgccagaacatctggtgaagccggcacctcaaggcactcctcaagcctggaaagcctcaccaataggattgatccagaatatgttccagcaaaaactacagcagagtaactttgacaagaaaaatgttcacttgctacctaaggagagtctctgtctcctgacctctgaatttcgaaatcctcagctctggctgccacgcagtgggaaccgaatgagatggctgggcagggttctgcaacacagcagaaaccccaggcttcccaagacccaggatcagaactgnataatgncacttctgcctcactttggtggacnaaagatttcacaaagaatatttt

SEQ ID NO: 831 - DNA, 464 bp, Homo sapiens
acagagtctggctctgttgcccaggctgaaagtgcaatgggtgcaatcagaatttactgcagcctcgacctcctgggctcaagtgatcctcctgactcactcagcttcctaagtagctgggactactggaaaattaacctcattcagactgaggagaacagaaatactttgagaaatctcacaaaatagccatcataatgtgaagaagccgaagcagcctgtgaagaggcgctagtggaaaggaactcaggtgcccctgccctcagtcccagctgaactctcagctgacagccatcaccaacttgccagccacaggagtgagccaacttgagagtggatctttcagtcccagtggagccatctcagctgacacaccatggtaaaaagatgaaccatccttgctgatccttgccagtgctgcagatacataagcaaaataaatggttttgttggtttaagccact

SEQ ID NO: 832 - DNA, 480 bp, Homo sapiens
atcctcccatacagtggcagcctggggaggcattgccaacaattacaacagcccttctcatttgaattgaatggaaggccaaagagcatgaggtctgaagtttaggatgtgaaggagaaaagaacataacctcaaaaacccaattttaatgatatttaaaaggcctattccctccagaaatgtcaacattactcaggagtatagcaaaaaacagcctggagttttcatgatgtgaacgtgagaccaaagtcacactgaggagagattaaacttggaacatgattgccagtaaagaagataactcctgcctagaaaaagcccagctggtgacttccgttacagaattcacaaccacactgggttcacaagcccttcttcccacatggaagcccccttttcttaaatgtcccagattctctcttctttagattggatgccagtgcctcttcttcataaaaagtgctcagcttttgaaaaaaa

SEQ ID NO: 833 - DNA, 319 bp, Homo sapiens
tggagcctactgacagcaacgtgacaaaaccactctcttgtttgctttctcctggactatcctgaatggggaagagaggggtggaattacaagtaggttgcttcaattttgcataaccctggatacccccctgtgagggtgtgaggcatgtgaaagccatctgtgttggagcagaaaacaagttgagagctactgaatcagagcattcacatcaaagaatgaatgcaaactggctctcaccaccagaagccatgttcacagggagaaggagaatggacagagactctcaaataaaccacaaaacaatggtgaaaaaaac

SEQ ID NO: 834 - DNA, 249 bp, Homo sapiens
  misc_feature 140: n = A,T,C or G
gccctcctgcgcaagtaactcaccatcttcctgtgcccagctatcaccacgacacctgcaggtgagctcactgcaagcttggcgtcgtggtgctgcgcacagccctcttcagcacacagtgtcagcaccgtcctataaantctccagccagcctttgtttctttgcagtcggcatctctcatgcaggctgccctgtctccttgcaacctatttttctactttctccaataaatcagcctttttctgcct

SEQ ID NO: 835 - DNA, 428 bp, Homo sapiens
  misc_feature 7, 8, 9, 10, 14, 15, 17, 21, 32, 64, 67, 115, 128, 143, 148,197, 207, 215, 235, 266, 284, 294, 295, 321, 333, 365, 404: n = A,T,C or G
gtggggnnnntaanngnctgnttgaccgcccncgtggagctctggtgattttctgaggaaaagngancttgaccgactaaaccgagagtgcctcagagagcaaatacccatcggncacgtacttctcnctttccagacgggcnctggnatgaaccctaactgttcacagactcctccacaggcccattttctatgcnattctgtggnttcctgantcttcatacccaaaaactangaagaacctccagaggggacacaccgccatnatgagagcctggctgganctggacttcnntcctctctgcaagatgaagcaccatntcgaaatgaacngcagagtccgacccccactgctggtccagcgnggatatgaggtgtggactggaatgctcttttgcattatncactggggccatgatgtgccgaaa

SEQ ID NO: 836 - DNA, 507 bp, Homo sapiens
  misc_feature 145, 173, 261, 487: n = A,T,C or G
taccactaaaagtggaaaaacgattatttgaacccaggcactctggcacatgctttatgagattcatttctttgcaccctcagttaaggaaagacactaccattcaaatagacaagctacataagacagactaccgtatacactnggaatcacgagtctccaatcaagaaagngggattttgtcgtctcttttcctgttaaagaaacctgggtttaagacaagctcttgctaccttataaaaccatttggctctaaatcanattaaggaagaaaagggaagaagcctaaaggaaaatggggtcatggcaaaaaatatttccgggacaaatgggtccaccatgaatggcctggaaagaactggcttcttcattttttaacttgggggataaaaagaaggggacatttcttcccattcaaaggaagcttgcttcttggaatttgggtctatggttttcttggatgccatttttttacttaaaccgccanttaccattagggggttaaat

SEQ ID NO: 837 - DNA, 447 bp, Homo sapiens
  misc_feature 335: n = A,T,C or G
gtacacctggagtcctaagcccgggagaagagggcacagccccacttcctctggtaccagtagggccctcttcagagacagacgtgcctaggaaggtgcaggtcctcctctgctgaagatcctcacattccaggggtgcaagaggggcccctgcaaagtcagtctgctcagacctaagtcttggtgttatctacttaacaagtgaaggggctgagaggaaggtcagagtgactaacaaaaccagtcctgaggccttgacacctgaggacaggattgctgtcaataaaaatgtagctgaccttaagagtcacagcctgaaagaatctcaaaatggnctaaagtatatgggaagctttctttcttattctggtaccttaaaagagcatggcaaagagcactgtggggcagaaggaaggatctgaaaattccattctgatgagacatcta

SEQ ID NO: 838 - DNA, 453 bp, Homo sapiens
  misc_feature 407, 410: n = A,T,C or G
gttccgtgtggctgctctgagaattctcccaccatagagagatgggtgatccctttgttctgcatgaagtcaccaatccaggcaccatggaaggactctgtgaggagggcctcccctctgagaagatgcctagccagcagggacctcatgcttgagttcagatgggttgccagacagatgaaaactccagacatgacagctcctcctctgaggctttgcctgggttcttccagccacaccagaacagcaccccacctgcaacacacaccctcacccaagccccaccagaatactgcacatcggctatgtttgtcagaatacaaaaacagagacagttttcagaaagatattctttattgtcataagttgccacgggtgggatggtcaagcgagctggcagaggctangangaaatttttgtgtccctggctggagaagtgatctgggtgtcac

SEQ ID NO: 839 - DNA, 406 bp, Homo sapiens
aggtgagtttctcagagcatctaacaggtcacccaaaaaaggaggatggaaagagacatcaagtcagaagaatggcactcacattctctctctgctggagattaaccacatgcccttctatgatgatacaactgcagatgagcagagacctttaaaatatgagctccagtccccaccttcctggccttgttgtggtataggcactacggccctgctcccctttcctgagtcaatcctagagatctggcacatccttcaggggagatctagaataattcaccttctttgacatgctattcactatgcctaggtgaactcttttccagcatgctcccttacttcagctacaatcttacttgcttctagctatgcttgcccagtcaatataaacacactttgataccat

SEQ ID NO: 840 - DNA, 116 bp, Homo sapiens
aaccaggaaccataatctcacactgggattatggactgctgtcttctatatcactgctgagccatggacggagttggacacagggcaaataaaatgccacaaagttttctaccatt

SEQ ID NO: 841 - DNA, 392 bp, Homo sapiens
  misc_feature 350: n = A,T,C or G
atccagaggaagaggagatctgactgtcatctgcacatggaacaacagaaactgattttttaagatatggtttcatctgatgcactgtatcactgcctaagacagcaatcccttgatgtgccagagattctgatgcccctgtaggtgattgctgggaacttgtttttctgtttcctcttttgggatcataattggaaaggtcctgatcacaaataatatttgatggatgggcagcattttcggcaaggacacttgcagtttctgaaatatttaatttgccgattactggggaagaaacatagaattcatggtctttgtctgtagcttctctaagatcattctctttctgngaatattctggttgaccaataaaagcaacaggttgggatggt

SEQ ID NO: 842 - DNA, 444 bp, Homo sapiens
atacagagttgaagagaagagagcaccagggatccaccaggcaactgcgttacagaaagaaagtcacgcacaggaaaagcagatttctgattctgccaccaggaagggtcaaagtctggacagcacttggtcaggagcctggcttccctttcttgaaaaacatcacatgtaaacatctaactgagagcttggtacacagcaggctctgagtgttggccccatcacgatgacaaccaagggctaattatgaaataaggaggacacaagaaaagacactatcaaggatacagtttttttaaaaaggtgggggaaagttcatctttttttaaaaaagcatccatagacttaaaatttttttgtttggggtctgtaaaaaaatagcaatatgggtgaaacgctatgataaaaaattgcccaaattcttgttatgttaaaatggtactg

SEQ ID NO: 843 - DNA, 300 bp, Homo sapiens
gttcaggaaataactcaccagaaaatgatatctgagcaaagacctaaagaagaagcagcgagctatggggatatgtgcaggaagagtattccagacagagggagcctcggtgaaagaccctgtggtgggagcatcctggcttgctcatggggcatcaaggaggccagtccacctgcagcagagtcaggacagggctttggctttgtacaagcttaattaagacaaagaaacagtaaaacacccagaataaaacactttataatctggagatcattaataaaactaaatacggatttaaat

SEQ ID NO: 844 - DNA, 214 bp, Homo sapiens
ggatcagttctttgctctttgaaacgaagatgatccgtctcacactgaaagtttcctatcgtgaggttcagtgtcatctagagtcaacggatgaagtataagtgttcactgtggaatttctacaacacaaaaagaagaggctggataaagaagataaactgaatattgaaactgttccttttccattaaaaaatagcaaaaaagttttccctgt

SEQ ID NO: 845 - DNA, 422 bp, Homo sapiens
gcaagcagaaccctggaatggcttcctcagaccctgtcctgctcagacttcacttcctgtcactctcccgttgttcactgtgctccagacatgccactgacttgctggtccagtagcctccagtcttcatagagaaaactggagaggctgtcctaacttcacctcagcattggccgtggcagcgagggcctgccctgtgtcttgtgcgtgctcaccaccctttcctctgtacctctgcatggcgcataaacactaggcacagagacttgaaaatcatccatctttccaaacctcaccgaattcacaactggccagcactagagaggaccctgacctcatggctgcacagtcactggggggtgcagacagtaaatccgggatcactggacaagtcacactgcaacaagtgctatgggaatgca

SEQ ID NO: 846 - DNA, 463 bp, Homo sapiens
  misc_feature 10, 20, 24, 360, 365, 379, 423: n = A,T,C or G
tcccaactgnggcactggangtanagcagcaatgaagacagatgtagtcctggcattcctcaagcttatagtctaataggaacgtctacactgagaaagaaaaaaaagaaaagaaggaagaaaagaagaaacccttctctgacacttcatagacaaaaaacaagaggagatgattatttaagttcatcagtgggagtggcacctgccctgtcctactctggttactagggaagtaacagactccttggaaaaaacaacgttgagatggagagggaaggggtgaaactgggaaatgctaaatctgaattcagagtatctggcctcatcattcagatattttaagggataaagggaagttgncgggnggaaatctgaaggngaattaaataattggaagttatgatgaattgccattccatctgngtattgcctttaatctctggtctggctcttctacctgcca

SEQ ID NO: 847 - DNA, 230 bp, Homo sapiens
gtgatgtaatgaggactcatatatatgcacatggagtgaataaatgaattaaggaatggatgggtgaaaacaacgaactgtgaatggtccagccatcaccaataagacacgtaacaacttttcccacctcgcttcacgctgccaggcaacgcaggctggcattgttgtagtgagttgcttctgttcctcacaagccaggatttaataacagaataaaggaatgaactcgc

SEQ ID NO: 848 - DNA, 391 bp, Homo sapiens
  misc_feature 331, 333, 345, 351, 354, 358, 359, 363, 369, 373: n = A,T,C or G
gcttgccctttggaagcagccaccaggctgtgaggaagtccaggccacatggaaagaccacatgtagatattctgaccaacaggcctggttaacgtctcagatgtcatgtgagtgagtgagcaaccatatccctctagcacccagccttcgagtcttccagctgagatcccaggcattgtggagcacagaagcgtcattccccctttgctctgtccaagttcctgatccacataatccatgagcatactaaacgattgttgtataccactgagtttgggggtaatttgctacacagtaataaacaattggaacaaaaaaaaaaaggccagngnggccaattcaanttgganttnaccnnggtngacttngttnaaagggggggacttccca

SEQ ID NO: 849 - DNA, 442 bp, Homo sapiens
  misc_feature 312: n = A,T,C or G
agagaagagggtgtttccaagggaaagcttcagaagcccaagcccagctaactttctgggaagccctgatgatacccccaggaacgcagcaactgcaaatcaaacctcatcaaaatggcaccagctgaccctcctctccacccagggtttctcaacacccctggcaggatgcgaggggatgaggagtcctcgggcttggacccccgaactgtggtcatcatttcatcagatgccagctgtgtagcaacaagagttgctatggaaaacaaccactacagcaacagactgaaatcactccaaaaaaggagccgncactcattccaccaacataccactggggacgcgggaaagcaaaacccttgggttaagaacaacattcccactcccctccccagtttccatcctagtaaaaattctcgtgcttgtttgcatttttaagttc

SEQ ID NO: 850 - DNA, 106 bp, Homo sapiens
  misc_feature 5, 12, 47, 55, 56, 85: n = A,T,C or G
gtgangacacancaagaggcaccaccttggaagcagacagctttcanagaggagnngacaccttgatcttggacgtccctgcctncagaactgtgagaaataaatt

SEQ ID NO: 851 - DNA, 438 bp, Homo sapiens
  misc_feature 98, 103, 107, 136, 182, 189, 193, 196, 198, 205, 268, 294,311, 315, 360, 377, 416, 422: n = A,T,C or G
ctaaacaagcactggcctcaagagaagcaatattaaaacaatttgcagctcaccaccagccgctgactaacggcgcccccctgttccaacagccccanctacngctntgattggacaagaggctgatttcagttancttcctcctgatgagaaaaccacagccatggactgattctggccgntttacanaggntgngnacttggntgcctttgagtcctaaaaaggaggtgtagggcctaattgtaatacatgtaaatgttaattctncaccccaaagcacacatggttatatnacacccagccgtgttanatgnacacatgcctcaagaccaccttcatgagtatttgaagctcttcgnataacctgttgactatngtatgttttggccaacctgttcaactaaaaatttctgtntaattncctctctccctcaaaa

SEQ ID NO: 852 - DNA, 224 bp, Homo sapiens
gaaatgaaggatttcttattctgaggaagggagagacgccgaggaagacaggacttgaggttttactaccttcgttattcgaactcccctctaacttgttcctgtactagaaacccactcactatggagaaggaaggagaggggctgaactgatggacaaacgttgtaaataataggttttatgtaatccacatataaataaattaatcgcctgactcgctccg

SEQ ID NO: 853 - DNA, 458 bp, Homo sapiens
  misc_feature 1, 6, 7, 22, 30, 33, 43, 47, 52: n = A,T,C or G
ncacanntgagatcttggctgnttatgaancanggaacaagcnccgnttttnagaagcaagctcaagagatgatgaatgaaggaaggtggagctccgaagaccatgaagaactgctacagaagaaaacaagctttcaataaaataaaagagacatcaatcacacattttacccatttatgaaacatgctcaggacaaggtactcagacgtgaagaagcattcccaggaaccatcttggagaactggacttggtaacatgagagctgggaagtcccaattcttggtcatgaagagtctaccacgaagagaattggtttggaaaccagaaggctaacttttacatgaggcaccagggcttatgccccccagattttcagagaaggacaataatggggtatttctggatgttgaaatcctaggattgatctgacagcacaaaccaaatgccagcagtttcc

SEQ ID NO: 854 - DNA, 438 bp, Homo sapiens
  misc_feature 338, 340, 356: n = A,T,C or G
atgtttgcatcctgatgaactgacaccacttggacccatgactcataccaaggaaataaatcaactggtcctgtaactcccacccagaagctgactcggcatgcgaagacagttccaacactcctgtgatttcatctccaaccaatcagtagcacccattccccagccccctgcctgtcaaattatcctttaaaaaccctaccctctgagttctcagagaggtggatttgagaaatatctcccatctttttttcttttacaactggcaaatatagatgagtctgtagccataccagacccatgtggcccaactttcacgtaacaaaagtaagtacagngntttttaagttgccatnggaccctcaaggtcatgtaatctgagcatgcccagatggaccaagtgttcaaccacagagggaacctgattgctctgactca

SEQ ID NO: 855 - DNA, 160 bp, Homo sapiens
ttttattcacagatgaccagaccaccagagagacctatcgaagtctacatttcaaagaactttgcctcaccttggttgataataggaggaactacagcaagagggtaaaaatttgttagaataatcttgataatggataaatctacatctgctatatccc

SEQ ID NO: 856 - DNA, 138 bp, Homo sapiens
  misc_feature 18, 35, 50, 58, 77, 79, 83, 94, 107, 119: n = A,T,C or G
ctacctgcattaagtcancaactgaggaaccaggnaaccataattctcanactagggnattatggacttgctgtctntnatancactgctaganccatgggcggagntggatacagggnataataaaatgccacaaag

SEQ ID NO: 857 - DNA, 436 bp, Homo sapiens
  misc_feature 341, 398: n = A,T,C or G
gtggggtctttcagtgcctgttttcccgcccacgtggagctctcatcatttcctgagtaaaagtgaacttcccgactcagccgcaagtgcctcgagagcagagacccatcgtccacgtccttctcactttccagacaggcactggcatcaacgctaactgttcacagactcctccacaggcccattttctatgcgattctgttgtttcctgaatcctcaaacccaaagactaaatgaacctccagaggggaccaggccagagagagcctggctggagctggacttctctcctctctgcagatgaagcagcggccgaaatgaaatgcagagtcgacccccanctggttgttccaggggggatatcaggggcatctgtttctttcttttgcattctcagnggataccatgttgcacgaaatctgtggctgcttttgtt

SEQ ID NO: 858 - DNA, 442 bp, Homo sapiens
  misc_feature 9, 326, 330, 350, 351, 362, 389: n = A,T,C or G
tgtgtacangcaaatttctgttgtgcctgggaagaaggaaatttgagttaaagaggaggcccgctccatatgccttgtcacaagtacactcactgaaacattaattcacgaagagattgcaacaagaccaaaacgaaagaggaacagggcctgacaatgttcagagaaggaaagccgaagaagtaaccatccccaagttaaaaatgacgtggggatgaaaaaataggttgcctgttgtatttgtcattgaaatgcacaatcttgtttactgtttatcttgagactctgggagctctcctgctgcttaggaaaaaagaggcaaaggnttangaagaaatgcttggccttannaaagagaggcnttagaaaccctagagagaatgggaggngtaaatagtatgtgggcatttggcaatcaccacaaagaaatgggagacaaaaa

SEQ ID NO: 859 - DNA, 443 bp, Homo sapiens
  misc_feature 336, 345, 364, 372, 378, 392: n = A,T,C or G
ttcctccagcataaaaacaagacaaagttcctgcagagctgctctaacccaataataaaattggacaataagctgcatatctgccggaaacctgggactggcaatggagatgagaagagaatcagaagggatatgtctgatgacatagaagctgtggaatccattcttcagggtctaaactcaagcctggtccttagttctccgtactgtattcttcctgacctccagacctgagcgtcctccccttcaaaagacaaagccatccaaagagtctgagcactccaagtgagcagcttgaagagtgagagacgtggacagagggaagggcaggtctgngcaacctgngggccttaaaccccacctntggccttntccagngaagccacactcangatttaagagaacttgtgatcaacttggggtatttgcaccccacgaaaaga

SEQ ID NO: 860 - DNA, 312 bp, Homo sapiens
gctgggagattaatgctgtcctcaaagtgaagagtcaccactacttgtcaagtcatgtcatctctgcagccacgtgcattttgtaagctgggaagaataaacagacatttctgacatttttgcttgagatttaacctcagcgcgtcaagagatagagaggggaacagaaataaataaaatgtggctaaataaggactgtttatcacaaacacaaggcagagatctggtgaccatatctgactttgaaatctgtgtctccaggaagaggaacatcacacaccagggcctgatgtggggtggggggagggggga

SEQ ID NO: 861 - DNA, 418 bp, Homo sapiens
  misc_feature 341, 343, 359, 378: n = A,T,C or G
tgtctcagatttcaggagaactgtgacccatgcagggggtttgagtcccagtgaaagtggagaccctgtcatcctgagaatcgtccccagggggaaaccatctttttctaaggcggaatttctcaacggtggaactactgacattttggaccagtgttcatggaagcctgtgttgagagagccacagagcaaagtatctgggaccactgagtcaccatatggaggagagctacctggaacattcagggtggacttcgtataagtgagaggtcaacagatgtcctctctgttcctggtcaccgtgctaggtgtggaggacacagagagggagaagacctttntngctttttgggagctancaagccggtagaaaacttntaagcaggaaagtaaaatgatcagggttttaaaactcaat

SEQ ID NO: 862 - DNA, 262 bp, Homo sapiens
ggttgttagtggacatcatccgagcaaaacttgaaaagtgcttatatgactgggcttacctgtacatgttcctgcttttacatgagaggcacatgcctccaatataaccactggtccaagaaagataggaaatacatggagaaaacctggtttctatctgaagtttggagccaccccaacaaaaaaaagcctgaagaaggggcactccaagccactcaaaaacacatgagcaagaaataaatgcctattgctgatgccactg

SEQ ID NO: 863 - DNA, 298 bp, Homo sapiens
gacaccacgaggcgaaggaaggaagagcgagcagatgtgagctcctaagcacggccgtctccacccactgctgcactcctcagccttcccagacacagcctggtttttcctactgcacatggcactttcatgaaaggccgcctgttctcacatctatctcctgaaactcctttaggagtggagacaaacgggcacaagtaacttgagttgtaaagttcaggaaaatttagataagtgcttgatcataacacatcagctggtttaatggaccatcttcgcataaaacacttcatccttg

SEQ ID NO: 864 - DNA, 156 bp, Homo sapiens
gtctgaggtgaaaccagataatttgctgaacatctaagaagcttttaggaaactacacttcggaggagagtgctgtgcattggaaaattggaaacatctcaaatattacatgaggcttttgcaggcgggattaccacgcagcttcctgctcctgcc

SEQ ID NO: 865 - DNA, 12 bp, Homo sapiens
attcttgccaag

SEQ ID NO: 866 - DNA, 180 bp, Homo sapiens
gtgcttcctgtattaacatccttgcaagtggtacctgcctctctgaggatccagctacgcaatgaatctgagaaagcttaaaatcggaaatgctgctctagtaatggttctcaaaccctggtggtcttgacatacaggtcttattaaaacacagttgctgggctccacctaaaaaaaaac

SEQ ID NO: 867 - DNA, 182 bp, Homo sapiens
gatctgggttggaactgctctgcaaagataagtggaagaaactgtttatttgtaagagaaagaatgatgatggcagaaaaaggagagctgaatgcagtcactaagaaaattttgcaccctgagactccgtaccacgatcctgtaacattagcaattatgaaaattattaaatggttgatatg

SEQ ID NO: 868 - DNA, 457 bp, Homo sapiens
ggatttgcgtactctattatgaatttctctttgagaaataatacctgtgagaatgctgctccttcaattaggttcaggattggaggaaaaatcatataaaatagttggtaatctttcttctctagaaagtggcaacgatatatagtactgttgaaccatgcctgccagtgtcaattcctgaaatggcaaaagaaaagggaagaagagaagataatgctataatgatcagctcccaaacctctacttaaagcataaatggagaaaagaaagctcggtgtagtgctacggaacactattcggcattaagcagagtaaatagcttagtcaacagtgtgggccattgtcagtctttatttgtcatctctcactgagtgatcacaactcagcctcttatgtgtcctggaagtgtccaatctccaagttaactatttattaagaggagatgcatcttaaaagg

SEQ ID NO: 869 - DNA, 259 bp, Homo sapiens
gaactccgggtgaggacgacaagagctgagctcgggtgcttgccttctgcactctcgggaggaggcaccagcatgggcacccttcacagttcgggcccctcactcacaaacgtctggcacatggaaacaagctggcaaaaagattgtttttttcttccgtactttttgttataagcctgtggtgaagtgtccatatctggcataaatgaatgtgagtggtcttgggaatctaaatataacatgtttctaagttacacac

SEQ ID NO: 870 - DNA, 436 bp, Homo sapiens
gaaggaggctgccctgcctggagtgaagagtgcatggagcagtctcagccgacccaggtgggatgcgtaacatggccgagaaatccacccatgctgctgagagctactgcgccatggggtcatgtgtcacctaactgacttagcccagcctgactgatcccccgtgtgtgaccagacatcagcacattcagaggacctcatactgggaattggtggacctttcagaatggacatgaccactcaaagtagggacattactcgctatttgatggcccatgtgggatcaaaggccactggggttccctcaaggcacagcacacttagaatcccataagtcctcagttctaaggcatgtatttttcatacttttgataattctgaaatcaaagtatagctttctagtagatattaaaactcattttcagaatcctgcaga

SEQ ID NO: 871 - DNA, 458 bp, Homo sapiens
gcctgggatgacctctgcctgttttcaaccattattgatgcgcaatttatgagaggatgatgtggcaaaatgatttgaaaattggaagtgatttactgcacaacttaaatattttgtcttatcattacagcaactctataagtaattaattctggcaccatattttacaaagaactttgacaaattggagcccatccagaggagaacaaacaatcttgtgaagggtctggaaaccacaacttgtaaggaatgatggaaagagctgaggatgtttaccttggaagagacacattttaagaggaacatgatagcttttttaaaaacactgaaaagaactgtctggtggaagagagatttgatttattcaatgttactctggagtatacatttaaagccaaagagtaaaagttaaatcttaaattctctatgatctaataaccaaactttcccaaaccaac

SEQ ID NO: 872 - DNA, 450 bp, Homo sapiens
  misc_feature 335, 357: n = A,T,C or G
ccttgagacaagaactcaacctggtcaataccttgatgtcctgaggcttatgatatcctgagaagaaaatccagccacaccaggacaggcctctgacccacacaactgtgagctcatgaatgggtgttgttttcacagctcagtcagtgctgttttgttacagagcaacaggaaacgaataccccctccacgcagatctttttctagagcaattaattatgcatacggaacggatgaaatgtgctaagggaccagtgaagaagctgacggtgtcctcaggatgaaatagagagggaaagaaatgctattcattccacaaacatttccacccccanggaaggccctccttcctgcatntagccacgattcaaggaaaggtgaactcacaggaaaaggagactaaagttctgatagaggaacttttaccataggctaccagccattctttcc

SEQ ID NO: 873 - DNA, 426 bp, Homo sapiens
aaacctgagaggaagcagaacatgaaagcaagaaatctgagagcaaatgcagcctttagatgagcttgaacacagaagagaggcgatcagaggagaagatcaaaggctggggaaggaggctcacaaggacttcccacaccagctgacagtctgtgcagagcaggcctgtgcttcctccctcagaaggcagggctctagcagaatattaggaataaggcatttctctcttaatacagaagaatgaacagtgtcatgtgtgttggtaattggtaattgctagattgataaataaatagggcatccaaattcatttctttaattcttaccctaatttttgcatcttccatttataaaatattttaatcatgttttatatctaagcttatatgtttttgatattactatcaaaaaataatttaattagcc

SEQ ID NO: 874 - DNA, 321 bp, Homo sapiens
ggtctcactcttgtcacccaggctggagtgcagtggcgcaacctcagctcactgcagccttgacttcccaggctcagacacagactcagaaacttgagacaacgttgcccaagatcattccacactgagaaaaaaacacattagaggcagcagtgttttgaataggtgcatggctagtgttaaataatggaaagaaattggaacaagaggcaagttgtgaagtaaaagtcacaccctggtatgaaaacctgttgtcactgtagcgaaacttgctaattacagaccggctccatcagtagcttcacaatgcacaaaatcacc

SEQ ID NO: 875 - DNA, 371 bp, Homo sapiens
  misc_feature 330, 334, 335, 353, 355, 356: n = A,T,C or G
aaattcctctttttccctgaagaaagctgcctcactgaaggacactccaccttcccaagggcagcctacaatggtgtccatgctgagcacacctcctggtgaacctatgcactcaaatctctgtccagcacctgcttcctggggaatcaaccgaacagatgatgccaggagtagtctgagaaagaagatgctaagatgggatctgaggctgccagctgaccactgacaggcaatgagatccccgttaccgttggtacaccgagctgataaagcccctgacacaagatggtgatgaaactggcaaaacttccaatgggggttaaaatggangggnntacagggggaaggaaatngnntttggggtaaaaata

SEQ ID NO: 876 - DNA, 433 bp, Homo sapiens
cacctgagcaacacagacggtgtccttgtgagagaaacaagcagcttgtgccctcagagcaggaagacaaagagtaaagcctttatcccactgtttggacacacagtgactccatctcattgaagcctaggtgatgcacttaatcacggtccaggatccaccagctatgcaggctcgggctagaaaacagattgcttcacaccatccagagctcttcagcagcctcacattgcagtcaggctgcaactggacagatggcatgcagggctcagatgtggcacagttgggaagcatctgggtcccactcaggatacaacattgaaaacatcagccacgccctgctggatgagccagggtctgatgaacggggacttgctcagcctacaggtgtcccccagccatcttttcttcaccagcacaaaagcttcactcg

SEQ ID NO: 877 - DNA, 328 bp, Homo sapiens
gttcgtggtctcgggggcttacatgaatgaagcttcgcagaccttcgcgattggccttcttctctttctctacaggcagcaaagaatatgccatctacagccttgcttagcaacctcaggagaaagggagctcttctttctctagagtccatagtgcaatcccagagaagcgttgattagctgtgctagggctccatgcccatccctgtatccagagggacatgttctacaacttcgtgcaaattaaaaacaacacatttttgaggaggacagtagagtatgctgggcaaactaaataaataaaaataaataaaccaaagtccactgc

SEQ ID NO: 878 - DNA, 404 bp, Homo sapiens
acaccaaccaaatgctgtctttgaatgtacctactgacattctcaccagaaatatagaaatcatctgttttcccacaaccactccaaaaagactctacacatactggatttaccactgttcagggaaaaagcaagatcatctcagcatgtggagcaagacctgtgatgccatcttcttggaccatctcattttttagtttacttttcgccatttttatagagaaaacctgagttggctagtggcagaatggttggagctgataactgcaaagagtacatgtgaaatgctaatatccatgcctctgaaacaggatcattacacagagggttggggaactccagttattaagtatatgtaactcccattccttaataatgatatttttaataaactcttttttctg

SEQ ID NO: 879 - DNA, 450 bp, Homo sapiens
gtggatgatcaagagccctcatctggaattagacctatcttgcttgttcagatccctgaaggagaaaagaactgctggtatcccaacctcaacgcagcaagtttattttatgtgttttacatgatgtcctgatccaaaagctggttttttaacaacaagattcacaagacgaaaaaatattttaaaaatatggattgactgcttggagaaaatttaaaatcttttgagcagcactgactttgaagtggaaggatataagcagtgggagctgaagttattcagatacacagagcaaggccttcggacgagagctttgatgagtcctgaagcaactgaagtcatgaatacgcataagctataacttacaaggcaagctatttgggacagaagataaggcatccacttcttaggaaaaatgagctacgcgctctacggtgtctggggtcacat

SEQ ID NO: 880 - DNA, 458 bp, Homo sapiens
  misc_feature 387: n = A,T,C or G
ctatcctactttggagaagacgctggaaattcagagtttctgccagagaatatatgcctgaactaaaagaggaagtggcctataggagaaaatgaaatatgattgtcccttcagtgggacatcatttgtggtcttctctctctttttgatctgtgcaatggctggagatgtagtctacgctgacatcaaaactgttcggacttccccgttagaactcgcgtttccacttcagagatctgtttctttcaacttttctactgtccataaatcatgtcctgccaaagactggaaggtgcataagggaaaatgttactggattgctgaaactaagaaatcttggaacaaaagtcaaaatgactgggccataaacaattcatatctcatggngattcaagacattactgctatggtgagatttaacatttagaggtgacagcatcccccacactggcagtgtc

SEQ ID NO: 881 - DNA, 274 bp, Homo sapiens
aatgaccccacctggactcctgcctcaagacttaacatcctgtggccctatgcagaggcagactcatcacaccaggactgtttttcacactccaatcattttttttccctgaccaatcaacattccccattccctagtcccccacccatcaaactatccttgaaaaccctaaactccaagcctttggggaaatacatcaatttgaataataactctgtctcatgcatggcatggccagcctcctgtcaattaaactcttcctttactgcaatgt

SEQ ID NO: 882 - DNA, 265 bp, Homo sapiens
ataaatatgtactcaaagcaggtggctcaatccacttatcagcatttggcataccagggttcaatgggtaatcacaaagaagaacggggcagagctagagaacagagagaacgctttttgtgactcaagtgtgcagaaggtaatcaactcttcctaaggatcagatgatgccacttggccctacaatgtgatatcttcagtttcctacattcagtaaaacttttcaagactcagcctcatataatagaatgttactcaacatttg

SEQ ID NO: 883 - DNA, 278 bp, Homo sapiens
tctctgcaccctacaatacaccaactggcagttccatcatttgaaagaaaatcttcaaggtaaagacatttacaatgacacaaaaacctttcaaaggcatcatggtcctaaagggctttccccaagggacagcacagtgtgttccaggccctgacaagaggtttaagacctgtgacacagactgaagctctcctggcatactctgaagctctcctggcaccctcccctttatgcttcacaggtgtttctcctaataaatttcttgtatgtctcatccc

SEQ ID NO: 884 - DNA, 312 bp, Homo sapiens
gttttcccgaggatgactctggctgccctgacagccccaccacaggggacagcagcatttatttgacttgactaggattggaacttccagtgatctacaatctccatatgatctctgtttctacaaggaagcaccttctccatgaatattatgcacttagttaaactgagccatggaaagccaatcattcattcaacaaatatgtacagagtgtcaataatgtaccaggcaagaaacaaggagctgcgctctttcttcaaggaatccatagttctatcagtagaaggaataaaatattctaagtgtctttgt

SEQ ID NO: 885 - DNA, 123 bp, Homo sapiens
ctgtatcaaatctggattgcaagctggccttctgattgaagacgtcaggaatgacacacaacagcctaccatcctcatttccactgctctgctgaccagcctaaataaataactttaattttg

SEQ ID NO: 886 - DNA, 450 bp, Homo sapiens
ctcaaaatcacctgtgatatctgcagctggctttgcagagcttgtagatttgggctgttgaccaagacagaagggaaatcagggatcgtgtctgcagccgaagaaagaagatgcaggcgatagaggaggtggagaaggagtagctgccccctctttcctacctgatcatcagaggggaagaagccaagactcaaggagttaagaacttttccaagggtagctattagccaggactcaaacctacatacttgaatgaatttctacaacctgttattgaagactaaggaggcttctcagcctgggctggatcctggacagacaggcccaggcaggctgtgcactgtgacctggggccttgcttgtgaacaaagaggacttcaagaggagatggcctggaggagttcgcctttgtggtcattttgcttcagtccgtgacaacctggcttctgc

SEQ ID NO: 887 - DNA, 478 bp, Homo sapiens
  misc_feature 249, 279, 284, 291, 300, 302, 303, 308, 325, 326, 349, 357,361, 386, 402, 410, 419, 440, 451: n = A,T,C or G
agcgtaagatcttcaaggactgtgtgttgttcatctttggactgtgtgaccaccccacccccatgctgaacactgtacctggcttagtaagttttgctaaattcatggatgaatgaatgaaatgtgaagaagctccggatgatgccaagttgcaagggaaagccaagaactgaggggaacttttgggaggcatgaaatggaagaccaaaaaagccactctgcctccatgtactcttcgaactttccaanaataccatgctcttcttgaggacttttgcnccaanacaggtntttctttananngggcncgggggccaatcctggnnaatttcttgggccttggggttgnaaaaaagncctnccttgggaagccggccccaaaaaancttccggttggggaangggaaatnccctttttnccaaaggggtgggccgggacncctttcctttnggggggaattttttttccctaaaaccc

SEQ ID NO: 888 - DNA, 616 bp, Homo sapiens
  misc_feature 471, 518, 525, 531, 599: n = A,T,C or G
tccttcctctctgaagccaggatgaaataacgttgcgatgtaatacaacaaaccatatacttccaagttgaaatgacagtaaaatggtgtgatcttggctcactgcagccttcacctcctggactcaagcaatcctctcacctcaggctcctgacacaccagttgcacattcaggtgaaaattcaggaagaaaagaagccgtctacatcgcggtggatgccttggcttatgaaaactttgtgggttcttggtctcgctgacttcaagaatgaagccgtggaccttcacggctggctgagattttatatacacaaccacagctgtagaccgggatatttactgcagtgccgtctgagatgttaaaagaatataccaagccctattaattattcagaatataggagtgatgtccttcttctcaaagcacatatagttcacatccccaggcttaaattattattattgctatgntggagctgggtttaaaagttcgtgaggagtgattggtaaaatttcangaattgngcaagncagttggtaacacaacccttatgtaattatagaaacttacaattaaataaattatggtaaaaaccaangcataaatctctaactc

SEQ ID NO: 889 - DNA, 427 bp, Homo sapiens
  misc_feature 357, 360, 362, 364, 366, 367, 369, 370, 372, 378, 381, 383,384, 385, 398, 406, 408, 409, 410: n = A,T,C or G
gcttgaacccagtgctgaccccctcccaagaacttcttgttcttgcttccagaggattggaactgttccaggggtagcacttagagagcaggacatgcccataagcttgaggaaggtactgcttacaagaaatgagtcacagcaactccattgcttccaacaacaaagtggatgaaaaacactcaagccccactaaacaatactcggagttttgctgcgacagactggttagactatttggacactaccatgaagactatatccaccattctgccttcaaaggaggagactgcagagagaaaaggggaagaggaacaggaggaaaaagggggaggggaggaagtggaggaggggaanaangncntnntnnangaaganatntnnntttattgccatanaaatgacngnnngaatccattttttcctg

SEQ ID NO: 890 - DNA, 572 bp, Homo sapiens
atttaccgtgaagatgctgacatgtgttagaaacagaaaatccagctcatgtggtttagacggagacgtctctcatagcaggaaattccaggtgagggcagcaggattttggtgaattgcctggttgtgccaccaaggactcctgctcttctcatcttcccaggcggccaccccagggtgaagatgctcttccggccaccttctcttataagtgcaaagggctgcggagcaccaggcattgcatccagacagggaatgcaacattcaccagggaaaaaggagcatttcctctttatgttcctgtaggagtgagaaaacctttgccagacaacccccagcaggcttcctgttgggactcattgacttgagcttgtttgaagccaattgttggaaagagaaatggagttaccaagattttctcaagagacagagtttacccttagccacacaaagtggatacctgaaccagcaaggatagagagggcatggctgctgcattgtcaaccaacagtattcacaacagaatgaaaaacaattcacatttactactgaataaagcagacactcctgac

SEQ ID NO: 891 - DNA, 622 bp, Homo sapiens
  misc_feature 411, 496, 523, 551, 561: n = A,T,C or G
acaaagacagtcacagagttaacatgttttctgaggtcataccactaaaagtggaaaaacgattatttgaacccaggcactctggcacatgctttatgagattcatttctttgcaccctcagttaaggaaagacactaccattcaaatagacaagctacataagacagactacgtatacactggaatcagagtctccaatcagaaagggattttgtgtctcttttcctgttaagaacctggtttagacagctctgctacctataaacatttgctctaatcaattagagaaggagagcctaagaaatggtcatgcaaaatattcggacaatgtcacatgatgcctgaagactgctctcattttaactgggataaagaggacatttctccattcaagagctgcttctgattgntctatgtttctgatgcatttttactgacgcaatacatagggtaataagatactcatgttacagacacattatgtaataagtctgnatcggttatatccttatttggtttcangaaaatcaaggtttatttttacttctgngaaacaatgncatttcaacttatttatacatattcctttatcaaggaaataattttatcctggatatcccc

SEQ ID NO: 892 - DNA, 235 bp, Homo sapiens
  misc_feature 218: n = A,T,C or G
gcctccccttaaaatgtcatcttggaggaatggtatggcctgaaccccagcccgagtcgtcttccacagcgccatcctgctttgctttcttcccagcacgtacctttggaatgatccgatttctcactaactgtcctggcccccttgaatggatggcccagagagacaaggcctccttcacagcggatgctcagaatttaactaaatgatttaacgantaaatttaggtaaaact

SEQ ID NO: 893 - DNA, 231 bp, Homo sapiens
caagactgcctttctggccctcgttccttcttcctgtctgggactctagtgaacatcatctacgaaaggttctgatcagaaaaggcattttcagagctgacactggctgttgaaagaaaagaataaaaagcttgagactttcagcatcctggagaaagaatatgcttcatctacgcacctcacacatatctgacttgaaatcagattaataaatataatacttccacaagc

SEQ ID NO: 894 - DNA, 213 bp, Homo sapiens
atccagtaaagactgcgcgtctgacacctttaaaagtctcaaaaggaaacatttaccatctgttctttctgagggaggcttcatctatataacaagaagaccacctttgctagccaagccaccttttttcccccttcccacaaactgttttaccagaatccaagcccccattctttctgtaacctctaaatggtatataaatttctgtaactc

SEQ ID NO: 895 - DNA, 138 bp, Homo sapiens
gacgttctctgcaggcgaatagtttctgcattacaggatcttctgcaaaggcccatcaactcgtcaatggacagcaccaacagtttgcactctaaaattttttgaatgcctctcattaaaatcctcctcttgctgctt

SEQ ID NO: 896 - DNA, 219 bp, Homo sapiens
gtttatgctacaagttactccagttctaaactgaatggaaaatggaaccaggtgatgtatccatgtgaaaagagacccaccactggggatgagtgagctagtgaaacgctgctgcagaatgaggtacggctgagacagcggtgaaccatggacaggagggaggtacacgtgaatagacgtttatgtgttttatgctaaaataaaatgtataatgattgc

SEQ ID NO: 897 - DNA, 453 bp, Homo sapiens
ttctcttgtagctagtatgccaaaacttttaagagaccatgtgcaaccctccagagccctatttgttggctacaaggacctggaagccacatgtggagatggtggaatcacaggctaaagagtagtcttcattggaagtcacctttgaaaacagaacgtcacttttgtttagcactgcaatactcttcaccactctccacttgggttctccctgttttgcacactgtaagaaaatgaattaaccaattaattagccccctgtggctgagttcttaaactctagaaggggtacagagagatcctacctaccctatggatggcagaaatggcagctgacatgagtttcacttcctcatttataaaatagaggatactaacaggcccatcttcaaaggctgttgtaaagattaaatgagttaatatatgcaaataaactggaacagtgcccatgac

SEQ ID NO: 898 - DNA, 184 bp, Homo sapiens
ggttgcgggagcctacgaaggagaggggctgagccttataaaaacttgggcacataatctgtctaatcactttgaagatgaaaagttgctgtgaaatgccaaccgagctgatgggaccagggctggagcagagatgaagagacacagcagggccaattgtgcaaaaataaaatgcatatttttt

SEQ ID NO: 899 - DNA, 90 bp, Homo sapiens
caaaactccagtctgtcatcacctctgacatgcgccaagagctaccaggaatgatgaagtatatttcaaataaactttcctattaaagag

SEQ ID NO: 900 - DNA, 452 bp, Homo sapiens
agacccacgtattgagggactgaagtttcagcagcacatgggtgaccttcgaaatggatcctccatcaccttcagatgactgcagccctggatcacaacttcaccacaaccttgagagtgaccctcaccttgaacctcccagccaagctgttctcagaaggccagctaacttccaaaattacccaaggattcatcatatcaaggggcaaatggcttcctgtttctctctgtgtcctctcagggcattagtgtctggccctctctcaaggtacctgaatgctgggagcctgaatctgacaatgcccattgcacctcacaaatcagcttgagacaatgcttacatatgttccccctgcttcatatgtctcggttatacttgagtgacgctcatatacttttaccccattttgtatctctcagttatacttgaataacgctcatatacttttccc

SEQ ID NO: 901 - DNA, 636 bp, Homo sapiens
  misc_feature 595: n = A,T,C or G
gaatggaaactagggctcagaggtttcacttgccagaagtcactcggtccctgggaaggatgcaaaccagctcacctggctctccagcacatgcaccccagaccacccccaaggatgtgacccattccttctgtggagtctgatcttccaaactttagacaacagctccttctgcaagctttcgagcctgcaagctaaggacatgaatgaactgagtcatccccacagagcttcattaattttaaggcaatttaagatttctgagtcataggtttcagtcatttagattttcccagctggtactgtacttgcccacacacacttttctttaaagattgcatctgtctagatgtgtggttctgcccacccttcctcagtttctgagaagaaactcgccctcgtggagtgctacatgcagggctaagccatttccatttgccacgtgcattagagtctttgcctgagggattaatgggattagcagtctgcagcttgatctagactctatccaccagagacatgcacaattccaaattctatatccaacacaatattttacccagtcttcccagaaaattcagttatgccatatggngactccactcctgaataatatttaagcaacttgatgaacaa

SEQ ID NO: 902 - DNA, 477 bp, Homo sapiens
agcagtaggactcaacgctgaaagagaagaggcgggaagctaagaacacaaagagaagccatgcagggattcacaaaaacagcaggcagccagtgttgctgatggaatgttggaggaagctgtcttgttcagcaatacaggaaaaatgactgcagtgaaagaaaatggaacaagtgcatacattgacaagaaagatatggattcctatacacaaagacttccccttgccagatggcaggggtggcatttgcagatgatgggcagaggggctggccctcccacattaggtcagattggctaacagtcattccctggcaggaaggttcccaaccctgggtgcattgcaccatcatccgtgaaagatcattttattttaaaatcagattcttggttacaccctagccctacataattaggatctctggggattatatcctgccatttcacaaatattaaatgccattatgctgccttttg

SEQ ID NO: 903 - DNA, 294 bp, Homo sapiens
aagacaatgggatggatatttggatcagagtatgagttgtggatgaagagggaaaatttctcctactggcactgtgatgactagtgcaaacctacgctatctacaatgccttccctgtcttgcggctcattctttctgaagccagaacacttagagtgggtggggatagtagggagaaccaccatgctgcaatagcaaaccagctccagagaagggtcttcaaggggtgctaataatactttctgacaatgaatcttcactgtggggatataaattatatgcatcctaaacttg

SEQ ID NO: 904 - DNA, 433 bp, Homo sapiens
gacattcctacattgattgtcaaggtgttgaaatttccaccatgtagttttttctccacactcacagagaggctcacggtaaacctcctagagcatcttattaaaagagaaacgctacagccatagtcacagatgagctctggtgactaaaatcccacctaccactacttgactgttgcggtccctgaagcctacaaaatcgcagaatgattgctggttctcaaacctctaggttactttatgattgggaattttacatatatccattgcctgaaatgcccttagcatctattaccctttgagacttagcttcaatatcaagtaatgaagcctttcttaagtacctagagaaaatcagttttccggtctctcatgctacctttgtacgcacagctttctgttgttaccttttcaaatcaatcatttcaccatt

SEQ ID NO: 905 - DNA, 437 bp, Homo sapiens
gtctcagctgtgatgctcctcggaggctggctcctgttggccttcaatgcaattttcctcctgtcttgggctgtggcccccaaagggctgtgcccaaggagaagcagtgttccaatgccaggggtgcaggcagtggcagctactgccatgattgtgggtctgctgattttcccaatcggccttgcctccccattcatcaaggaagtgtgcgaagcctcctccatgtattatggtgggaagtgccggctgggttggggttacatgactgctatcctcaatgcagtcctggccagcctcctgcccatcatcagctggccccacacaaccaaggtccaagggaggaccatcatcttctccagtgccaccgagagaatcatctttgtgccagaaatgaacaaataaaaatctcctgggagtagcacaaagggcacaagtga

SEQ ID NO: 906 - DNA, 237 bp, Homo sapiens
caagcaagaagatatctgagaagcctgagacccatgccacagttcccccaaaggagcaagggaatgctggaagttactgaaggagaggaaagcatgtagaatccctggatccaaggcaaaggaagaaagcactagaattcaacttgggtctgcaaaaatgaaccacaggaagacctagacaggctttggcatcgctatcatggtaacctttgctactcataaacaacaattcacaag

SEQ ID NO: 907 - DNA, 633 bp, Homo sapiens
  misc_feature 570, 575, 599: n = A,T,C or G
gcacactggacccttccggaaagatcgcaggaagcgagtcagagccgagtctttttcgttggagcttacattctaggcaaataaggtcatttccgccagtgatcagttttcatgacaaagaacatacaactgtgatgcagtggactgacagaaggaccagggaaatggggctgctctttgggatgcgaatggtgacatcttcaggagacaacatctggtctgagacttgattgaaaagaaagtgctcaacttctgaaggtctgggggaagagaggctaggcggaaatcagggcttgtgcaaaggccccaaggcagcaagagctcctgtgatcaagaaacagagagaaggccagtgtggccggggcatgtggaggcgtggctgagccttgcaggcaacagcgagccagaagtcgggcttttattctgagtgcagtggaagccccttgggggttttcagcaggacaggcagtggcatgaaagcagaactgagagagctggggttacctccactgggtttattctctttccacattctctggaagacactccactttctttctttaaaactgnaattncccttggttgactttaataaccanccaagaacattttttcagctggttaaattttttt

SEQ ID NO: 908 - DNA, 647 bp, Homo sapiens
  misc_feature 537, 603, 614, 622, 625: n = A,T,C or G
attatatcttggccaagcacagagattccctgaagggtccgctcaagaagcaggaggtggattcagccccacagcttcccaaagtggacctactgacggtgcctgcagtcgacacgcagatggagacgcggcccatgaccctggaggagatggaggaagtgggcaagcggtaccgcgagcggcagcgacagcacaagctcacgatcccctccatccagtacacggagcaatgtcacctggtgcgctgtgggaatcggcactttgatgagcactgcctcccgtccaccatccacggggatatgagggagctcattgactcggcccgcaggcacaactttctggtctacctgcaatgctggaagctctgtaagtcctatggcctcccgctgacagaggacatcctcatgaaagccttgctgtacccaggagacgagatcattttccagatggacaaagtgtgccccatccggcagccgggaggctactactctgactggaaggtcttttctccgaatctggctcttgctccggtcccanggcccctggaaaacgcccaaagaaaagcaagaaaatgcgcttttaaggagttgaggaatttaccangaagcttgaangggggaanggncccagggcttgaagcaaacaca

SEQ ID NO: 909 - DNA, 298 bp, Homo sapiens
attattgacaagcaccgtgggctcaatggtgtcaagttgtacttgtggtttcaacaccccgcagcaacccacgtagccgctgggccctggattaggacccccagtctggcagtgcttatctgcccgtctgagtgatggagagatgagtatcagtctatacctcaactgcttcaagcccgcctgggctttctccctggcgcctttgtctgtgtcagggttggagcaacgaaactgaaagatctccagagtttgaaaacagagtgaaagagcaaatttaataaatgagagctcagcctcg

SEQ ID NO: 910 - DNA, 197 bp, Homo sapiens
  misc_feature 2, 19, 39, 65, 78, 88, 106: n = A,T,C or G
gntggctggaaatattcanaatgagagcccacaattcanctctcagtgccgagggacttccttgnctgatgtactgtngagcagcagnactatcttgttctgctanaactatcaaaagtatatgaaaatctcctttgaaaactcagaatgtaagaaacatcactgaaatcttcaattataaatcttttgggaagctg

SEQ ID NO: 911 - DNA, 645 bp, Homo sapiens
  misc_feature 408, 520, 608: n = A,T,C or G
atgggaccttcacaatatattcattgttcagctggaaaccctgggaagcagtaatctgagctccttgtcctgaggccacttggtggccatctccatccaatgttgtctgtggaccccaacagagggctgagcagctgtccgtccttgactctgggagaaaggcgttatcatcaagatttccataagtggacagaagacacactgaccatgaaaggaaggccagcactgggtgatcattttcattctaaatggaatctcatcaaataagcaaagaagattaagcgcagagaaaagacaatgctgtcaccatgcccatgccaaacacttttcatctattcttctgagactagctctgagaagttacctgggagattttacctatgtaagaagacaacctttgctcactgnggagttctgtccctcacttttctgcaatttggtggaacatccttcagagatcaaaaaaactttgttctaagacattggctggtcttgggactcattcaatctccctgaaagncacttactaccccttaaaattacctacatttctcatttctctcttccctatgaaaaaagtatttaagcttcaacccccttgccctttntttgagtttcatattttggatgggtccggaaacactt

SEQ ID NO: 912 - DNA, 639 bp, Homo sapiens
  misc_feature 576, 589, 619, 625: n = A,T,C or G
atggcactggctgaggcagaatgaatacagctgctgattctgatctcacactgggtatatccctgagtgctggaaaaaacatcaccctcagaagtgtgcattcagccagctgcctttggagagagccgggaagggtgcaaagtggcatgtcctttaccagtcactctttctgggccaatgcttatccagaaatgagacagaactatgggtttactgcaaatgaccagcatccgcaaagtgatcaagactaccaactttggtgttcactctgcaatgaaaaaatgaaccagcagaaggtggatgtgaaagactaagaagagccctgcagaaaacccgttagcccatgttttcatctgtaatgtggatgtgggatgggaagagggacaacgacatagtaccgaccaggttccagaaactattccaagtgctttacgtgataaaaatctcttaattgtctcaacgaccatacgaagtatatccctagtggtgcccctattttatagatgacaaaaccttactgatatctgtgtaactagtaaagtaggagagacaggattcaatctgtcagcccacttntgccggtggccgngtcccttgttttgggatcctgacaggcagnccccanccaggaaccccgtc

SEQ ID NO: 913 - DNA, 629 bp, Homo sapiens
  misc_feature 521, 548, 587: n = A,T,C or G
gtcttgtagaaatttgcctgatgcaccccctagatgtggtgaaaaccaggtttcagattcagagatgtgcaaccgatccaaacagttataaaagcttggtagacagctttcgaatgattttccaaatggaaggaaccacagcatgtgggtaagaaacttggatctgacagcagaagaagaaagaggatattgtatgccttcaatcagctttgtattaggagagccttaaaggaaaaattttgtgaaaaaagaaagaggaagaaaacaacaaactagcaagatctgtatttcagtataatttggagaaaatgactgatttgggttggtcatgttgccagaacagatgactcaaggcttccatacaagaaatggaaatcaggaggatgcctgaagcctgaaagaagaacaaattgtaaagatatgattgactgtaaggcttcaaaatcaactgtaccaaagatgagcttgaatcattgcccagaacagagctgaatggggatgttccattgggttctggctgntgaaacaaaataaaatgtagtaattgnaaaaaaaagaaaaaaaaaaggccagcgaggccaattcancttggcttaaccaggctgacttgctcaaaagggggggggggg

SEQ ID NO: 914 - DNA, 644 bp, Homo sapiens
  misc_feature 529, 599: n = A,T,C or G
aaaataggaaactttccaaaggaaaacaacaacaacaacaacaacaacaacaacaacaacagacacccagtgagtcttaagtgcctctgagaaggtagagttgaagagggagcaaacaaaattaagagatcaaccctgcaatccagaaactcagctgatggccagtgttacatagagccaagatttaagtgccactttgcttctcttccagtaaacaagacagataaccaactcatgagttgctccattttgcatttctaccagcaatgtgactactctcccctaccttcatcaacacaagccatgcagccaccgcagcaggtgatgcctggattctgctgcatccaggctgcagatgcctgatacctgacaccctcggaactgacgtctgcactgagagcacatctcccaactgcagagcccaggtgatggtgctgctgccagcagaagtgctgatgggccaagctcctacaaagctttcttggtcttctggagccttcagtgtgttgaagccacaccaaagcagaangcgctttctcattagtggaatagtatggtaattggacaccaaagctataccataaaatcatcaacactgnataattggtgctattgaaaatgcttatgggtcattattaaacatg

SEQ ID NO: 915 - DNA, 634 bp, Homo sapiens
  misc_feature 526, 565: n = A,T,C or G
atgggcaccatgtggatgaattggtggtgtgaaacgctgtttgggaggaaacagccccagcccaaagccggcaatcctatgtatctcctttcttgctggcctatcataggacaggtgtgtttcttacagatacaacaaagctttaaagcacgaaaaagatgaactcgaaacaccagtgactggaggaaccatgacaacacaaacaagaaggaaacaagaaagaaaaagcataatcctggtttttgtgttctgaattgtggatttgaaatggaggctcccgtggctgctgacagcctgccttgatgctgctgatgtctgggtgatgaacagtcatgggtttcctcccacctgcctctgtggattaatgaagagcaaggcaggaatggcagacctgccatctggaatgaccttacctgataagattgttctgccttccccgccaaaggtgaggagggctttcaggatgcaggagactgttttccccacaccttaatgagaaaaattgacctgtttattcaccagctgncttctttgtttctaatccaagcaattgctgcaaaatcgntttcacttctttcatggtgaaatttgagcagaaagccccctcgagtggcttatctttgcagacaaccaa

SEQ ID NO: 916 - DNA, 553 bp, Homo sapiens
  misc_feature 511: n = A,T,C or G
gacaagcgcgaccacccacacatgacggtactgtgaggggccagtagtacgaatgaatcccaactgggcggccctgcttccctgcctcaacccagggctgtgtgcttcccagcaggcactgccatctatccagccccacagtttcccagcactcagcacttctgatgcttggcctcaacctcgccaccactggagaagatgaaggtgcattctggtggcttccacaggtatgacactgtttcctgggacctgaagagaatgcactgtctacaacctgagctacaaccctgcagccacatgctgaataaagtgcttcaactcacagctcaaaagcccatggccagagtgctcttgggactcctgctacaatttttgtttttcactcacaagtacaattaaggaaataatcttttgggtttaagtgtaaatactaaaatctgccctgataaggtccttccccttgcatgcaatctatttatattctgttagcaggcaaggaacttcctatggntaatctgcttgatttgggggggagagtgtaatctttaaaaag

SEQ ID NO: 917 - DNA, 167 bp, Homo sapiens
gaaatggtacttttggatcacatgtgaaggtttaaaaaaatacagctgccctggcttcctgaaatctggaaagctttacagcatgaaagaagaatggtttcattggataataatccatctgcaataagagcaaagtccatactactattaaatgtgtttatccactg

SEQ ID NO: 918 - DNA, 184 bp, Homo sapiens
ttacaccacgcctcctgagtatgacagcaacattccttcagggattaaagaaaatgcttcagaagattggaacactgctcagccttcccaaccttcttttaccactgatgtttctaccttagtgatcttcctccttattttaatgcttctttctctttacaattaaaagttcataaaatctttc

SEQ ID NO: 919 - DNA, 441 bp, Homo sapiens
  misc_feature 159, 163, 189, 329, 342, 364, 405: n = A,T,C or G
taccctggaagtgctcagtacatcatatgaaccagagtgctggccaggaatgagaccacgctttgcctgttggtcaccgcatctccagggaactcagaggcatctccaggaaacacctgaatatgtgagctggttccttacaacagtccaatgaagcanaggngtgagcagatcctttttacagctaangaaactgaggcacaaagaggttgacagcacacttgccccaaagcgcagatctgaaatccaggcagcgctcactccacttggcatctgctgcagtggctcaaaggctgggtctggagtcatctgaaaggccttttcacttnttgtgtctggganggcaattggcccttgccagctnggacttttccacgtggctccatgggtgcctcacaacatggncctgggtcccaagaagacgagatagaacatttttag

SEQ ID NO: 920 - DNA, 325 bp, Homo sapiens
  misc_feature 11, 12: n = A,T,C or G
tctcccttgcnngccttgaggaaggagctgccatgttggaggctaccctatggagaagcccatgtagcaaggacataagggtggctggtggcccagacagaaaggagctgaggctctcggcccaacagcctgaaaagaactgaagttacacccacaatgacatgactttggaagcagatccctgagtcttcagatgagacctcagaactggccaacaccttgattgaagccctaatgagagaccctgaagtagagggccctcctaagccatgcctggatccgtgactcataggaactgtgaggtaataaatgtgtgctggttgct

SEQ ID NO: 921 - DNA, 508 bp, Homo sapiens
  misc_feature 397, 459, 461, 465, 478: n = A,T,C or G
ccaatttgagccagggaactgaagcagtattcaagagccttcttgttacactggcaccttctgggaagattaagcatctgtcatacctacctccccttcagaggtttggcaccaattggtacaatgaatgagaaaaggggagagatggatatgccgaggtacattcatggcaaatgaagattcaataacctcacatcagtgagcattaacattgatttcacagggggttgtactcagaaaggtgggcagcaatgcagagtcatcatgaagtacctagcagtaaaactgtactgcactcaaagaaccaacatcactgcagccagtaccccattgcattacaagcagtgactgcatttcagcaaaataacaacatacatcatattcaattaagtgtggnaaatttgtatttttatttgggttactgaatttaaatctcatctgcaaaacaattttaatggntntttngaaaggaaggggnttatataaagtttatgttggaaatcctaaa

SEQ ID NO: 922 - DNA, 370 bp, Homo sapiens
ccagaaaacctcccctgccaactcagcctgatagaatgatggcttctactcacatcatcctggacatcaaggtcgcagccagccttcagcaagatctggaccacaggaagatggcccttattggcagcaagatgcaggggagtccggccatgctgtgaatgcaaaatgaacaatgatttcggaacaagtcctcaatgctactcccttgggagacagagggcctagagcaaggtttgcacaggggctttcggatgatcactccctcctgcccctttggattggcaggagattcttatgggttaaccaaaattcaagtttgtctcagttaaccttggctattgtcattgcaatcaatgaacacgatatgttc

SEQ ID NO: 923 - DNA, 515 bp, Homo sapiens
  misc_feature 445, 460, 466, 469, 484, 487, 498: n = A,T,C or G
ctacagagaataaacatatgtagtttacgactatagccacattatatctctttggaacatcactggccaagacaatgaaggaatagaaaagacttacggtatagacaattaatctagctgaaaacacagtcagtctgagcaaggtttcttgctcctaaaattagaaaagaactcctggactgggtgaggagggtcaaaggcataacgtgagagctaagacgcaggttcattcttgtgacctgcatgacccttaactctctagccttatccctggagaggagatggcgttttccccagataaggttttgggatcagagggaaaggtacttgtgcctcctgtgccaggcagagttctgatgaggcagcaagattccagaagagaggactgtatggtcatcccagcaaaccaggccttaacagcgtcattacatttcccacgctgcangggaaggaaattttnacattnccnaaaggggcccaaacntancagagcacctnctaaatttatagaagga

SEQ ID NO: 924 - DNA, 273 bp, Homo sapiens
  misc_feature 13: n = A,T,C or G
tattctaggacangaagaagcaggaagagcaaagaggaaaaatgaaaagaagcaatgcctgtcaagatccacaaactttctcagaaatctccaacagacttctacatatgtctcattgaccaaaaatatctcatatgttcatccctagctgctcatggccctttgaataaaaccaaggatctattgacaaagactgggagagtagatatttgcaatattagcagtgtctaccacaccaacttccagtcattcaactaaggtcttttctgccat

SEQ ID NO: 925 - DNA, 521 bp, Homo sapiens
  misc_feature 445, 447, 463, 464, 465, 486, 506: n = A,T,C or G
ggtgcagatctgcgtagtgaaactacccacagcaaggatgtatgcctgtgaggtggcacagaactgatggatcagacttggccttcaacctcctgttatcctgatgaaattgcaagctccaaacaacagagacacaacattgaccaacagtaagatggcttgaagaaatatttctttcaggacaaactctgtgcattccatgagggtggatggatggacttatgaggacaaagccactgacatcatgagcaggaaacaatgcttctctcaagctgcagcttcgaaatgtcaaacagcctcttccttgggtgacaactgctttctgactcaaaggaagaccttgctctccagcatcaggggctgtcagaaactttgcttttgagtaagtacaacatcacactgcctggaggatctaggtccacctttacacagaagcacagagctncncaagaaaaggggtttnnnggaagggaaaatttcaaattnggttggactttatggggttntaaaggacaaaagga

SEQ ID NO: 926 - DNA, 512 bp, Homo sapiens
  misc_feature 440, 443, 458, 464, 474, 482, 486: n = A,T,C or G
atacaagtggatcctctaagaaacttgggagccttgtgggctggtggagaactctcaagatggcaccagcctgtctatggtctatgtgggaatcaccgccatccttgccattccatgcagtgtaccatgtgatgggctgcattacttagtgacaatgctaccttctcactccttgcacagaggagagacagacacctgcttgctccagggcctgcctgagctcaggctctgccacagggatgaagaggttggagaatgtttctgccaaatgccaacaacgcctcctcaaggacgattcatggaggctgttagcctgtgctcaacttcccttggcaaaactgcaacaaaggcatggcagcagtttgatgttcacagagaggagtgaatacaaagcatggctttaggcagacttcctttaaacatgcacaggctcctgctgntgncttatgccttttggnggaatnggaaatttcnaaaggggnggtntttccctgccctgtacaaagtttatt

SEQ ID NO: 927 - DNA, 440 bp, Homo sapiens
  misc_feature 326, 345, 347: n = A,T,C or G
atttatagtaaaatgattacattgacaagctgttctacatccaccctccccgtttccagcgtggagccctgaggcatcgttcaaaaaaggacaaacagcctgagaggcagataaatggatggcctggtgtaattttaaatcacatgaatgatgttgcttctctctcttcccctggagaacctctttccatgtctgactgacgataatgtgtgaaatttttcttacttagcagggagaattagtttgttttagtatccagaacacagcactgtatttggctactagctaagtccaatttttaatatattaccatgcataaacatggngggaggtcaaaaagggccncnctttgggcaagatttttataaaataagctgaggctcaattcatttttctcaaaacgctggaggcccctgcccttgccaagcccaagatccttt

SEQ ID NO: 928 - DNA, 530 bp, Homo sapiens
  misc_feature 396, 437, 442, 465, 474, 479, 488: n = A,T,C or G
gatacaagcaccttgaagacagagattatatcttggacccctacagcatttatcacagttctctggatactaaggtgtcttaatggaatgtggatgatggggtgtgtgaagtgcattctacctgcgtggagacatctctaatggctgcagatgaagtcctgcctccctggctattctccaccactgtagagaatggccacagttcacctggaatgtcttttttctaactggctagtctcatagaaaggcatttactgctcacacagactgctcctcctggctagcactgtggacccttcattcacaccagtgattgcggtggggtgttgacttctctgtcttacccactaggtggtttctgtctgcacacaggagagctgaatcggccagaacccncaaaaatcccagcctcaccaagagatgacacgtgacctggnggggnctcacccaaggcatacccctttncaagttagnaaaanaaaaaaccntggtcacaggggtttatagttggttatgggccgctcacaaac

SEQ ID NO: 929 - DNA, 530 bp, Homo sapiens
  misc_feature 437, 453, 457, 463, 489, 508: n = A,T,C or G
gtgttccggctcctgagaggatgctgaatgtgcaagaccacaagtgcaaggaacgccatgctcaatcactctgcaaatgacattacaaccggaataaatgcaaaggcagcaggtctctttaggacatacacctacacacagtgccaaactcatcctgtggccaacagatgtacagagaatcccagagtgctttattaaggatgggtgactgttcatagttggcatagttggtttcctaaacctgggaagctcagcaaaccagttttacaaaaacatcaatagatgatgatggtggtgatgatcttgataacagtgttaatgattatatcagaaactagtacttctgagggtttacaaggtggcaggcactgaggcaacatcttcctataccttctctcatgtgattcttccaagcatcccatcagaagctggccaangggggtcatgtctgtnatcncacacntttggaggccaaaacaaaaggatcgnttgaagtcaggagtttganaccagcctggcaacacagaata

SEQ ID NO: 930 - DNA, 518 bp, Homo sapiens
  misc_feature 422, 436, 448, 452, 453, 455, 477, 486, 500: n = A,T,C or G
actggagatatctaagttttcataagagatcatcagaagaaaatgaagatccaggctctctttcagctgagaaaacgcatccacaaaattccaaagaatacctggaagaggaaaagagacacaaagacagatacacaaggagaccatgatgaggcagaagcaagagatcacagtgatgcttctatgagccaagaaaatctaagaactgccagccatcaccagaagctaaaagagaagcctgaaacaaattctgcctcagagcctccaggaggaatcatcccgggagacatcttgatatcagatttccagcctccaaaactgtgaggcaacaaataatctgtcattttaagccaccagtttgtagtcacttgttccagcagccctaggaagctaacacacagtcagcctccattttttgatgnttgaccacacacanggttgaaccctnccgnntncggcttcttcttattttgaccngggaaagtngataaccatgtggnggggctccctccttgggg

SEQ ID NO: 931 - DNA, 495 bp, Homo sapiens
  misc_feature 380, 412, 415, 417, 424, 443, 453, 476: n = A,T,C or G
atcgcttcttgacctgcacaactttctgatttgatgagttcaacagaaaccaactcaaggtagcagatccagaaatgattagaacacttaggataatgaattattacattttcaaggcacatcagtgaatgttatgaagagggagaagaataaagacattgttgaacttagactttgacaagatgcatattggatatctaaatagagatatcaagaaatgaagatatgcatttccagttccagagagaaattcacactggaaatataaatttaggaattttaaagttagtggtcacatttaaagctgcagaatacaaagagatcacctgtgtgagagaactgagtcctgaaacatacccgtgtttaaagatctgggaggngcagaggaatttcaaaggaggctgagaaggancancngtgaggngggtgaaaaccagatagcnaaagaaagcngaatttggactgacttcctttgnaaaaattaaaaatgtaagg

SEQ ID NO: 932 - DNA, 410 bp, Homo sapiens
  misc_feature 66, 81, 109, 128, 141, 152, 185, 190, 226, 276, 296, 297,303, 305, 317, 320, 327, 329, 338, 339, 346, 370, 371, 373,375, 377, 382, 384: n = A,T,C or G
cagactgaggacctggatatctttgctggttcctgaaactctgcagacagtcctaagggatccagngggtcctctgatggnccccaatgctggaagtcacccatatagntctgaaaagttgtcacaanaaatggccgtttntggaggatgcncaggaaacttttcatttggcatgaaaaaggctnttggntttgcaaagacttgcagaaggaagaagtttaaattnttgagccctcaaaacagatttttagaaaagtgtcttccaacctttgtttngtccaaataaaggaagattnngacccncnaaaaaaatgtanaanaattaanantaaaaattnnggggggnggggggggggccttttttttgtgnntntntncccgngngtttttttttttaaaggggggggggc

SEQ ID NO: 933 - DNA, 510 bp, Homo sapiens
  misc_feature 455, 483, 490, 492: n = A,T,C or G
cctatggaagtaattatggattaactttgcctgatatttccaatgaattctccatagcatcaagcacaaatgatgatctcctaggacagtggcagcttctgagaatgcacaggaaagtgaccagggaaagaatgattccatctccaggaatccctggtgatcttcagagcccagacaggaccctgctgggccatggtaactgagaaactgagaagcagatacagtggtccctatgttggcaacctcagctgaagaggaacaactctctctataatcaaggacttctgaaaccagaaattaccagcgtggggagagaacattaaaggcagaggtgtctcttataagcacaacgtgtgaccaggtaatactgtctggattagcagctgtacagcctaactaagccctggagctacaattatctggtcgcattaaactgaaatcacctgaaaaacttncactgaacaaaccctttggaaagtgttnaatggcncnttcacccccaaaagggaa

SEQ ID NO: 934 - DNA, 631 bp, Homo sapiens
  misc_feature 19, 30, 34, 96, 164, 166, 197, 230, 356, 372, 388, 399, 462,463, 479, 480, 481, 486, 504, 531, 537, 550, 560, 565, 574,581, 586, 599, 609, 611, 612: n = A,T,C or G
cttcgcggggtggaggganaaacttctttncggnctttccagtgggggatcgaacgggtatcgaataagcttttgatgaagcccgccacatgggantcggccccttgaaccaaagaatggaattgcaccgcaaagttctcccggcccgctttggggtgggagangnctattccgggctatgaactgggccacaacangacaaatcggcttgcttctgatgcccgcccgtngttcccgggcttgtcaacgcaaagggccgccccgggttcttttttgtcaaagaacccgaaccttgtcccggttgccccttgaaatggaaacttgcaaggaacgaaggcaagccgccgggcttatcngtgggcttggcccacngaacgggggccgtttnctttgcgccancttgttgcctccgacggtttgtccaacttggaaagccggggaaaaggggaacttgggccttgnntatttggggccgaaannngcccngggggcaaggaattcttncttggtcattctttaacccttggcttncttggncggaagaaaaagnaatcccaatncaatnggcttgaanggccaanaggcnggggggcttggantaaccctttnannacccgggtaaaactcgtgg

SEQ ID NO: 935 - DNA, 503 bp, Homo sapiens
  misc_feature 410, 434, 437, 439, 452, 467, 472, 479, 482, 483, 485: n = A,T,C or G
ctgaggtcatttgactgaaggccaccaaaacagttgtctcaagtgtgaaaagagatcactatattttgtacaaatgaagaaactgagttaaagaaagattaaatgtcctgaacgataccaataactaatgactgatggggtggtgggttctttcttattgcatgaatccttaaaaacagaaaattgttcctgggcgtagtcacagatcgatgtgaagatagaagacagcaccagaatcaatgaactctgcaaagatcctggactccttctcctgctgcataataaaggaagtgaaattctgcttcatcgatgaataacaggattttatataaaactttgaatgacataggagggacaatttgcatagaacaacaagtcctcaaactggccacaagctgtctgcactgttnttttgaggatttccaaaatgccanaangngcactaacagctntagatacttgagtcnacaanaaacctntgnncnttttttttttaaggggtt

SEQ ID NO: 936 - DNA, 155 bp, Homo sapiens
tggaccagagtgacctcccaccttcaaggactcctgatcactttaccttgattgtctacaagggaatgatttacaaatcctacactatgaccatcctcaagaggcctcattaagaaaagcttctcctgtattaaatccaaagctgttttcattgt

SEQ ID NO: 937 - DNA, 535 bp, Homo sapiens
  misc_feature 452, 456, 465, 470, 486, 495, 496, 499, 500, 504, 505: n = A,T,C or G
gtttttgtcaagcaggaaaggatttgcgtttggtatcactgtgtatggaacaaattgacatcccagcaggattcctcctggtgggggccaagtctcccaatctgcctgaacacatcctagtttgtgctgtggacaagcgatttctaccagatgatcatggaaaaaatgcacttttagggttttctggaaattgtatcggctgtggagaaagaggatttcgatatttcacggaattttccaaccacattaacttgaagctcaccactcagccaaagaagcagaagcacttaaagtactacctagtcagaagctcccagggtgtactgtctaaaggacctcttatctgctggaaagaatgtagaagccgacaatcctctgcttcttgccactctattaagccaagctcttcagtgtcgtcaactgtgaccccagaaaatgggacaactaatggntacnaatcagganttctnttaaagggaccccccnctttgcccnnggnngggnngttaaaaaaacaaatttgttggggggggtt

SEQ ID NO: 938 - DNA, 488 bp, Homo sapiens
  misc_feature 468: n = A,T,C or G
gcttttggttttggaccatgagaatggcttacatattcaaaaggttggatttgggaagcaatgctaagcagtggaatggacatcgacatagagagatcagctccacacttatactctgccactcaacttccccatgtgacttgaggatcactctaactccaaaacatagcaagctcgcggaacatcagggttcatgcaaagtattccaaggagccccttgaagcaacagaatggattgctcttctatggtggaatggcaccctggatgattaaaaccgtagcagcaaacaaaacctccatcaagtaagaattcagagtgtgagatatcacgcacagccacgcgtggatctttatatacgtgtcaatgtgtttgattgtatttttgctttcaaagtatgtattgagcatttcttctaggtcctcaagtaacatctttttttaaaaaaaataaatgcttaagggaattgntttatattaaactcgctttc

SEQ ID NO: 939 - DNA, 482 bp, Homo sapiens
  misc_feature 425, 427, 436, 456, 460, 466: n = A,T,C or G
ggcccattgatgaccacaaaaaggaatgtccagtgcagctgcgggtccacttgagccctccaagcaagcactctcaagcccgctctgtctgggagctctgtgttttcagagcctgttgttgcagcgatgcctggaatccttgacacctgcacaccagcttcctgggcatttccacaccctccccctccccacctcctgcatctcccatttgcatctgaaatgcagctgctctgggccctatagaggaaagccaaatggacaggacatctccttgtttgttctccctcccctgagtcaaaccgaatctgaagctcctctgtgcgacgcctttgttgcctcctcattatgtttaaatgagcctcatctgcaggaggatttttttttaataaaataaaataaaaccaccacaaaaaaaaaaggccagngnggccaattnagcttggacttaaccaggcngaantttttnaaaaagggggggggcc

SEQ ID NO: 940 - DNA, 525 bp, Homo sapiens
  misc_feature 478, 489, 491, 496: n = A,T,C or G
caggaagccctgaagatgcggcaagctgttctctactttcttgctgaatgagcaaatgctctaaagagaagtaacagaagaaaaagatggttgtgccattgaccaggtgccgttctcgttgcccattcatttcctgcccgccctgcacacatcctgcccctaggaagcctgctcctgaaacaagtctctacccgcaagaagggtctcatgaggtgccagcctcacgatcttggacttcccagtctccagaactgcaacccttcttagctaaggctatggattggaacacctacaagtggtttttccacgtggacctgggctttctcaaacatggtgtctgtgttccaaagatcagaagggggtgactgaagtagaagcgaagtcagcaacttatcttcaggcataactacttttcctgtatcctgaaccctcgagaggggatttcttgaagaaaagaaaagaaaaaaattcccccttnttccctgggangnggaanagggtgggaaaaaaaaaagggctttaaaa

SEQ ID NO: 941 - DNA, 160 bp, Homo sapiens
gacatcaaacttcctggtcctcatgcctttagcctcagactgaatgacaccaccagctttcctgcttcttcagcttatggacagcaccgtcgtgggactcctcagcctccagaattgtgtaagaaaagttctcataataaacctctgctggtatctcttt

SEQ ID NO: 942 - DNA, 122 bp, Homo sapiens
ggaaactgagaccacatggtgaagaatctgtttggcgaaagggctggaagattccggggctgtgcctgcaatgagggatatacaacagttctccctatgcctggaacagagaacctcctctc

SEQ ID NO: 943 - DNA, 304 bp, Homo sapiens
gatatgacatcttaggaagaagggactgggggaaagaaagcactttctgcttctgtggatataaacacacagtgttttattccctagtgcaacaaaaccccaagatcaacagacaagagctgaaaaccctttcccaccagacacagtgccatctaaatgttctctcaaaagatagcatctcataaacaatttcaacaaaaggatgtcagcttttactttatgtgcatgcacaaaatcacttttcaggaaaaaaaatgaccattaccgaatccatcataaaattaattacatttagttgatcacg

SEQ ID NO: 944 - DNA, 155 bp, Homo sapiens
atggcagagatggcaagcacaaagaaatgagattcacgctattccatttgcatggatgaaaatacagacactttctaagtgaagtagaaattctctgacaattaacaagaagagtttctgtgtccgagatatctaataaatgttatttgctcaag

SEQ ID NO: 945 - DNA, 285 bp, Homo sapiens
gatcccagtgacattttactgcaacaaaaccaaactgtatgaagttaagccctgtctccaggaggcatgaaaccacctccacttctcgtgatgctggcttcttctcaaaacaatctcaaagacagctccccggatattttgaaaattcagcttctgtttttctgagaaaaatatattaataacttctgaattctctgacattgaataaattgaacaagagtgttagctttcatctactgggaaatattcaaagctaagtctactaaattgaataaaacttttaat

SEQ ID NO: 946 - DNA, 442 bp, Homo sapiens
ctccattgctgactggctttaatggaaagagtatttttggtcctgtttttgaggtttgggacagtaacaagaaaagaagcaatttttacatttaaatgggatgagaagttcaacacaaatatctgtagcaacaaggaaacatctcgaaaaattcttattaaaatttatacttaccgttgaaactacagacatatgacaactcaaaaataaacccaatttggacgtggaatgtttctttcaagggtcaagcatcctgttctggttcattttgatgaagcctatctacataaaattggaagaggcttgaagatcttttggtgtcagtttcctcatgtttacagtagtaggaggctacagatatctctaaaatacttctgttctaaaagactctgcaattttaaatggggatatattttatccaaacatggtaatgcctttgcca

SEQ ID NO: 947 - DNA, 670 bp, Homo sapiens
  misc_feature 40, 66, 78, 138, 222, 263, 268, 384, 387, 401, 413, 462,470, 503, 538, 546, 556, 566, 586, 588, 605, 635, 651: n = A,T,C or G
tgggggggggaaggcctttacccccttggcccattttaanagggttccaagggaaaaccttggganggggtaattaanttttaaagttttcttttaaccattgggaaaattgggaccaaggggaaaaagggaaaaaanccaaaattgggaaaaaattttgggaaaagggggaaaaagggggaaaaggaatgggaaaaccggcctttaaagggtgggtccaangggcccctcttggaagccccccaaagcctaaaaggccccantccantaatccccccttggtggaatccttggcacccttaacaccattcccaaggaatggggcccttggaaagttaaagtggaaaagaatccccccaaaaaagaaagtggaaaaaaataagnccntttaaacctggatngggcatttcccnccattttgggggaatttggtttttttgccctcacccttaactggaatcnaatggtancttttggaaaatctcccgcacccttaaaaaaangttctttttgttaatttcttccccaccctttgaanaatgtacnttttgggaanatccaccctntgcccggcaaaacaattggntntttaactccaccgcctntcccaaaaccttataagaagctaatgatantcccccccccctttgntggacctccttttttggga

SEQ ID NO: 948 - DNA, 315 bp, Homo sapiens
  misc_feature 256, 259, 261, 284: n = A,T,C or G
ctttaaaacttctgaacttaaaggaaactaccaagaaaaactaccaagaaaaagaagttgaagatgttgaagttgaagatgacctttctcttcacaaggtcttcataaagaaataataagtctaataaatttaacgatgtgtgatcatattctaaaatgaaataacagttttagatttttgaatgaaataggtaaaatggagcaaatcactttagagttctgcattctgaagaacacaaccaatctccttacctgnggngnatcaaagataatattcctcaacngtattaaaccaatttattgccaggctctgtc

SEQ ID NO: 949 - DNA, 495 bp, Homo sapiens
  misc_feature 141, 144, 148, 154, 158, 164, 165, 168, 180, 182, 183, 188,191, 335, 344, 362, 378, 383, 389, 396, 417, 424, 448, 454: n = A,T,C or G
ctctcaacccgtctcccctcttccccattatggactgaaggtttctgtccttccaaagttcacaagatggaaattttaaccccattgtgatgacattagaagataacgagatgatgatcatactgtaaaagcccattcaanganggtnaaaagnagcnaccctnnacnccccaggaagancnnctggnacnatcatcaacacagaagatgacttctgtggccaaatgtgtgggagtttttcaccactcaccaagcagcaagacaccaagctgggtgtcctccaattcactgtgacactgtctacccggagatctgtcatatcgcacagggtgaanactcaattnccaaactcccccccaccngagcaaatcccacctntgggnattttngcccccnctttaaaatgggtttttaaancccattnggggttggttaattggtggggccncttccnaatttaaggaaaccctttctggtttttttaaaggggggggg

SEQ ID NO: 950 - DNA, 582 bp, Homo sapiens
  misc_feature 1, 12, 16, 23, 28, 33, 58, 97, 145, 154, 175, 260, 328, 338,354, 358, 362, 374, 396, 431, 439, 441, 467, 495, 506, 514,518, 525, 526, 531, 534, 538, 555, 559, 560, 569: n = A,T,C or G
naactgagctanggcnaagggancctgntacantggtggattgctccgaacaggagcngcctgttcgggccgagctccggttccctccgagagcggnttgcaaatttctcctaatgtgggagactggtgcaccaggccaagtggnccccacttnccctttttcaaggactggtgnaaaccaaatgggaatttgcccccgaaaagtgggctcccggggggcccttgagaagggatcaagctgaggaagctgcaaaagcttngttaacaaggaaggggcaccaggccccgtggttgtgggccggaaacaaaagccaacctgctttggtcntcttggcaanaaattggaattgcccngggnttcnaaaaaaatccgnaaaccccaccttgggggggccntttttaaaaaaaaaataaaaaaccccaaaccggcntttgcccntntaaaaaaacccccaaccttttggcgnaaaaaaaaagggaaattttggggttgtnaaaaatttttntttttggnaaancttttcnnggggnaanaaancccttttgaaaaaaaancaanntttttgggnctttggcccaaaa

SEQ ID NO: 951 - DNA, 500 bp, Homo sapiens
  misc_feature 118, 121, 126, 128, 136, 148, 155, 160, 161, 164, 166, 172,293, 320, 330, 335, 344, 347, 352, 359, 381, 392, 401, 419,422, 436, 447, 453, 463, 474, 481: n = A,T,C or G
aacaaagcatcaggtcaagtacccaaggccacaaggtgaagaagttggagtcaccaggttcattctgactgtaaagcctcaccacatcactagcaggagaagatggagaagcatcatnatntgacncntgatgaancaaaaaattggnctttttnaaaanngcngnccccanaatcttcacaagccatcctgaccatcttgcaagagtgtcaggagatttcactgggtttcttgtgattatattcagagattcttgtgatgacattggtggggacttcagttggaatcactgntattcttatccactttccctggatggnccctcagttncttanccaaggtanaanccaanaaggcangggttacagaataaaagtgctntgggaatgcanaaagatatnctactctgcctgaagganaanaaggcttctcactnttaattgggcnttttancccaaacagncccttgggagnggggaanaaaacctgagggggcattt

SEQ ID NO: 952 - DNA, 503 bp, Homo sapiens
  misc_feature 438, 440, 447, 448, 451, 454, 458, 460, 490: n = A,T,C or G
aggcagcaacatccacttggtggtggtgaaggatgattgagatacttggactggaaagcttctagccaaggctgacacataaggaagattttaggatgactttgttgaatggatagagaaggaggaagagcatggtatatggggtctctgttaccctgaatggtgaatttcagctgatgttgtaaccagatgccaccttctctttttcatgattagataacacatagattacccacctacgggatggaagctgttagaagctggcctttcggagagcaagtggggaggcaggtgatggtgtttcaacgccttgctctaagcctctttatcaaagtggctacatatcccacccaaattgcctttgaaacttggcaagttcacttgacctgagaagttaagtgctgctggaaccccagctgaacacattgtcctgggaananaaaaacnnttngcncctntntccttccttgcatagaaagggtaaatttgnttacagctttccc

SEQ ID NO: 953 - DNA, 481 bp, Homo sapiens
  misc_feature 375, 397, 405, 408, 410, 433, 464: n = A,T,C or G
agttaaaaatctgcggtttttaattgcacctgaggatgcccccctgctctgttcctagctggtgttcgacaggcggaacggaaggattgaagagctgaccacaatacctcccaagccactgtgcttcttacagcatggcgccaatacccgtccctttgagaagtggagtctttgttcccttcccttgagttttggcaggactctgactatgtcagaggtaaatttatgtgacttccgagactgggtcatgaaagacaacaccggttctgcccagttccttaaaatgaaggaaggctggcaccatggtgtgaggaagccgaaaccacacagaggctgccgtggatgctccaccaactgcccactgaggctaacccnccaacatgggcatgaaaacatntttaaaanaantnttggccccacccccccgaatggnagaaaaaggtttcccaaaaaaaaccaccccnccccccgggactggggg

SEQ ID NO: 954 - DNA, 507 bp, Homo sapiens
  misc_feature 403, 430, 437, 443, 444, 458, 464, 492: n = A,T,C or G
atattggctcacttactggatcaaggcagctacattacaaaaaagaaaataatttggacagaatcaagaagtctattataatgtaggtatttgaaatctacctccttgctgaacttggagattgatctacagaagaaaaatcttagcatctaaaggtctgttttcaggaaaataaaaatgtctatcaatctaccataaacctgtctgggttatcaacaaccatcaatgagaagacccaggggaaaatttagggacagagagcactgctcagacttcatgtggaaatggaaagctgagcagtcgcctgggttgaaagaacagaatgttcttcactgcactgtcattcagcttccaggaatgctgcatttcagtgggtatgcctgtcatccagccgctaattcancttgacaaggcccgaacccaaatcatnttgaaancccaanntttcctttacgggngccttntgaaacaaaatactttccaaaaaaacanacggtttggtctgga

SEQ ID NO: 955 - DNA, 487 bp, Homo sapiens
  misc_feature 405, 431, 435, 441, 442, 443, 447, 467: n = A,T,C or G
cttccaagcaagctaagcaatgtacgttctggcaaacggacaccaacatccacgctgcattaatcatcggtcccacaaaataacccaaacaagacccaatgactgactgagagaaagcctcaagtctgagatgagacgtctgccctctacagtctgttgtgcccatactttctcctacaacaaagcacacccgtcactagaaggcaggatacactgtacttcttaagatgtgactcagagaattaacaaggattcttcctgcaaggtcaaagatgataaatatgaatgctaatgtcctgcactcatcagttactcagtgaaagagactacacgtaggtcataaagttcctacttgccataagattaaacaatgggctactggctttcttatttactgaacatcanaatgaaagtcattgtatgggcctgtntganaaatannntganagggtgggttcccaaaaaancccaaaaaaaaaaagggggc

SEQ ID NO: 956 - DNA, 318 bp, Homo sapiens
gtgtgcaaaatctcctccctgggagccaagtggccccctcagccagcaacagtgacaagaagagatggataaagttgtatcaaatgtctgctgaccttagtgaggggagacagagccacataattgtctacagaaaggattatccattccggtcattgtactcaaatgcttagaaaattctgaacattcttcttgcccgagggaaagtactacgcgatgaacagaactattttggtgtgaaatccacctgattttaaatcctggctttaccataaacacattcgctctgtgactttgagtaaattacttggctttcct

SEQ ID NO: 957 - DNA, 515 bp, Homo sapiens
  misc_feature 399, 407, 412, 414, 421, 423, 458, 460, 482: n = A,T,C or G
gtttttgtgtggacataagttttcaactcatttggataaagaccaaggagagcgattgctggatcatatgcttcctacccaccaatattgagaaggaagtaaaatggaaaagccaagaaagaatggtcgaatcaggacaccatatgtccattcctggcttctactcctttttataaacacaagagtggaaaggtttggctttattcgacacctcaaagaggagatgcaggaggatgagcagtctgcagtgcaggaggttggagacaaagagaaggtgatgtcacagaaacctacgggcacatggtcccttctccaaggtgagaaaacggaggctcacagaagcataagaacatcatctagacacgcacctggttagtggcaaagccaaggccagaacangctaatangtggnangacttgncntttctcaaaaaaaaattttggcctttggcctttcnanatgatgctggaaccaagttaanactttgggaaaccattggggaaggcatgactgt

SEQ ID NO: 958 - DNA, 268 bp, Homo sapiens
  misc_feature 14, 23, 51, 56, 62, 64, 65, 77, 78, 88, 100, 103, 104, 108,109, 127, 150, 203, 205, 212: n = A,T,C or G
cataactgacgatngagaagcantacttcatcatctttggagaatttaccnacggnccctgngnncccgatccccgnnacactttctnatggattttgtnacnntttnntaaagggggaaaaagccntttgacctgaagggcttttaggnagaaaaaacacaaccccggccctcttgtggtgcagtcttttaacattcacgcngnaccgtgnaccccttggggaacattcatctctatttttaaaaaaaatgcttttaaggtatcctc

SEQ ID NO: 959 - DNA, 426 bp, Homo sapiens
  misc_feature 314, 342, 344: n = A,T,C or G
ctgcccacctctctatgggatgagagacttgagaaattcaatttaatccaattcagcaaacactgagtatctgctatgtgccaggtactgacaggtaccagaaataaagagatcactgtcctcgaggtctggtgagaaagacgagcatttggaagtgctctaacatcagcataatgacctgaacaaggtggcacggagctgagaaagaagcggtacttttatttcctccttctgtacagagtatataaatatattatgaacagtatacagaataaatggaataaagtcaatacctacttcattgccatccaggncaaaaactggaggtttttcctatacttnanaagttccccatgcatccctttcacaattccctcagtctcctaaaaacgaactacaatcctgaccgtttgtaataatcgcaac

SEQ ID NO: 960 - DNA, 491 bp, Homo sapiens
  misc_feature 3, 5, 8, 10, 11, 26, 27, 33, 41, 52, 53, 56, 58, 62, 68,102, 340, 347, 351, 356, 364, 377, 397, 414, 418, 431: n = A,T,C or G
cananctnanntgaacaaaccaatgnncgcttnacccaagnagaatgggaannccnantttnaaattnggaaaactgggccctttggtttccttttcaaaangaggtttaaagggcagaagagcccagaaccactcccaatggacaggcttttctaagtttctccttttaaactttaagagggagtttcttgcactgagaagaactgggaatgggcccatcggtcccggaaacatctgggaagaaatcccgtctcattaaagactttcagcaaccattggcctcagggtactgtgaaagtgaatgctatgtgccttgtaaggctaggtgacaaaaatggncatgcantttncaccntgtttttnttatgggacgccnctcttgggaatccaaccctnccataaagcttactggngganggaaaccccatanggaagccccatggcgggaaaggatcaccatgggggagggtaacccagcttaacccaaggg

SEQ ID NO: 961 - DNA, 519 bp, Homo sapiens
  misc_feature 3, 5, 16, 20, 23, 25, 30, 70, 73, 363, 377, 393, 424, 432,474: n = A,T,C or G
ggncngccttttctgntccntancnaacangaccccctttccctttggcctactttaacctcttggggangangcaggaaacccccagccaaggaaaagctggccaggggagggaaagaagaaagccaagggaaaagggcacccccagaagaaagaaaggggcttgggggtccccaagctccaaaatggtctcattatcttgtatttgaatatccccaaatttgaaaaattcaaaatctgaaacacttctgatcccaagcatttcaagactcctaagagttaatacgaagtaagaaagaagaagttggagttaaagcagctcgttccaagttctgattttgccattttcctgtctgagtgganctggaggtattttntgccaggaatgtgcanggtttggttaccataaaataaaacattgtgnccatgggngggtttggcttgcacctatcaaccccattcactttaaggtanttaaagcccccagccattgccattaactggttcttctttgggcct

SEQ ID NO: 962 - DNA, 448 bp, Homo sapiens
  misc_feature 8, 13, 41, 76, 106, 143, 150, 152, 164, 187, 192, 197, 201,223, 227, 247, 320, 336, 363, 365, 371, 381, 388, 399: n = A,T,C or G
cagatttnatganaacttactcactatcatgagaacatgtntaagggaaactgctcccatgattcagttaccggcncatggttctgcccttgacacgtggggattntcatgtgtctcaccattcaaggtgcgatttgggtgangacacananccaaaccatatnacttgctaatgaggaaactgagncaganaggtntagngatgtacccaagtctgcccggncggngagtggcagagccacgcttntagaggaggacagcccagccccgcatcccccgtgcttctccatgtattatgtccctgcctccctgtttgctgntccactggaatggttnaacatgcaagctttccttccagctgtngngccagnacatggcttncttcctnctcccgaagcngaatcgcgggaagccataggttcagaagatcccagctttctctgctttg

SEQ ID NO: 963 - DNA, 442 bp, Homo sapiens
cagcagtatccactatggccaccatctccatcttccacagaataaggaaaataaaatatctacgatagactttttcctgaagtcacccaattactaaataactgaggtgttttcatctggataattcatgcttcattattgggccactattctctgtcttgggttctcccttggctcctgtgacaaacatggggttcagatccagactccaggaggtagtgatgcttcaacttttggtaacatacaggagaaaggccatatgaggacccagcaagaagttggctatacatgggaagagagaactcaccagaaaccaaccatgctggcaccttgatcgggggccttccagactccagaaataagaaatctacaggagtaagtcagctaagaattctgttactgggtcgtagaattcagctccctccctgtgggataatggaca

SEQ ID NO: 964 - DNA, 516 bp, Homo sapiens
  misc_feature 14, 16, 17, 23, 27, 39, 41, 59, 69, 85, 103, 203, 320, 343,355, 391, 395, 407, 413, 435, 493: n = A,T,C or G
gcgctgggactccngnnctactncatntgggtgggtttngngggggaaaaaaaggaggnggaaaacacnccactggaaaactggntcccattggggcctgtcntgcttaaaaaaaggcccagagaggcagtcttgacaccctagatcccaagatctccaaggatttggtggcatacccactccagcacacagaagcatgaggntcatgactctcctcttcctgacagctctggcaggagccctggtctgtgcctatgatccagaggccgcctctgccccaggatcggggaacccttgccatgaagcatcaagcaagcttnaaaaggaaaatgcaaggcgaaanacccaagggttngccaagacaagggccccaaaggccaagggaagcagnagantccaaccctttnttgggnaaaaaagggccttatacggagncaaaaaaagcttgtggggggggacttcgggaaaaaactaaggaaaaagaatgccagtngaagatctagaaaagcgtgggtg

SEQ ID NO: 965 - DNA, 531 bp, Homo sapiens
  misc_feature 16, 17, 21, 23, 24, 25, 27, 29, 39, 43, 50, 53, 60, 61, 66,68, 73, 74, 79, 81, 112, 305, 328, 364, 375, 406, 410, 420,454, 471, 505: n = A,T,C or G
gcacagacttttgccnngccntnnnancnaacttaaggntaanaacccanggngggggcnngtttnanggccnntaaangncccctttgcaggtgggaatggccgcccgggncttactttactggtcctcgggtcccgaagctttcttggtgggtaaacttgagggaaaactggctggctttaatgaatctaaccagaagggaatgaataattggcttgttgccccaagggacaacccccacccagtttcacaaagaaaatcccgtgaaagaagaagaagcatcttcttcaagggtgaaaaacantaaacccatgaaggccccttttnctttgggggttttaccggagaatgaatggttttgtnggaaaaggcantgacaaggtcaagggggttaccgtgccaaanaacntctgggaacntcgacttaccttgaaattgaatgccaagcctcangccattgggttaaggcntggaatgccccttggggccaagttatttaagtantcccacattgactcaagtttgaaaaa

SEQ ID NO: 966 - DNA, 208 bp, Homo sapiens
gaaaaaaaagaagcctggaaatggatcatccaggactgacttccaatgatgtcaaaatccttagcggttgatttatcaccttatgggcacaagatggttgctgctcctttgaggcatgaagaaggaataagcaacaaaggatcatgcctaaaacatcactgcccaacagcgccacagccccccaacaataaaccttcccttaaatgcc

SEQ ID NO: 967 - DNA, 440 bp, Homo sapiens
  misc_feature 336: n = A,T,C or G
gatctgaggatcataccctaatagcgacctaaagtgttcaccactctcatgccgaaaaaaatcatctctccttggaatagaagatggagacgatgtcattctcatatcaacagaggaaagtgaaggcgacaaggatctttccataacatgtactaattcatgttcttctctttgctctaaagtatcactctgttgagaatttaaaaccagtggaggaggtggtttaatgtcttcttcttgcttcacctccactgtaatagcaacaggatggtgatccaacattacctgtagtgaactggtaccagcctgtgcctcctcatcccaggttggcctatnaccccccaaaaagcattataatatgtaaatcaaatgaagaaaaagtgtatatttatagcataattttaatttaatgtcattaaatgataaagctttaaaactag

SEQ ID NO: 968 - DNA, 466 bp, Homo sapiens
  misc_feature 51, 83, 202, 297, 302, 308, 316, 326, 357, 395, 416, 423,427, 451: n = A,T,C or G
ggctttccgcccggggtgaaaacccaaatcaaggtggactgaaagaagaanaaaggttcaagaatgaacagggagtggccgtncaaagggtaccagacgcttggagggaagccatgggaataaaaaattttgggcgggccattctgctggtcccagaaataaagaactacatttttccaagcctccttttgcagctggaccncgggcatgtgaccccattttagggggcatggtaaaatgggaggccctgtgtggcagctttttgggaaactttctttttgaagggggccctgttanggggnaacttnggaatttntttttttggnccacttttccccacttccctcatttttgaanggcctaaggccttttaaatgcaaagctttggggacccncaaaagttggagggacttgcncccccangggnatgggcataaggggtaaagcccanactggtggacccagt

SEQ ID NO: 969 - DNA, 449 bp, Homo sapiens
  misc_feature 433: n = A,T,C or G
agagcagagagcatcgatccggttcaagaccaccctcatgaacacactcatggacgtccttcgccacaggccaggatgggtggaagtgaaggacgaaggggagtgggatttctactggtgtgacgtcagctggctccgggagaacctcgaccacacctacatggatgaacatgtgcggatcagtcacttccggaaccactatgagctgacccggaagaactacatggtgaagaacctgaagcggttccggaagcagctggagccgtgaggcaggaaagctggaggcagccaagtgtgacttcttccccaaaacctttgagatgcctttgcgaagtaccaccttgtttgtagaaggagtttcgcaaaaacccaggaatcacctggatcatgaagcctgacacaagaagctctgacgaccagaaagatgatattnccggtggagaactatg

SEQ ID NO: 970 - DNA, 459 bp, Homo sapiens
  misc_feature 321, 356, 369: n = A,T,C or G
atcacaaatgccccaactgggtaactgtcagaacccaacaccatcaacgctctgcagaaagtaagggggtgagtgaagatgaaaatggagcaagaaagagaacttagcatgatgactgcacaccctcagtgaatggcaggcctaaggggagaaatttaggcctgtcccacctcacagtgaaaaaactcaatggttcctgagactcatactccctcctctccactgtgtaggaggctcccaggacacatgacagtgaaaagattgaggcagtcagagggaaacttcgtctagccccaacacaggcagagatggtaggagctnccccttcccaacaaggctgaaaggtcgcatggccnccctgaagctcanaatccacagatgatcaagtgaaggatgacagaagcaatctggattatgcaaagaattgctctgaaatatgaaagatgattttaaagcctg

SEQ ID NO: 971 - DNA, 441 bp, Homo sapiens
  misc_feature 339: n = A,T,C or G
gttcttacttgaaactgatttaacatattaaggaaagggatcaattgaaagaatggtgggtagctcacagatgactgggaagtctgctttggatgcctgctggaacaatggaggttgagaaacagctaggaccccagctgaaatcatgcctgtctggtggagcattaacatgcttccagaagtcaaaactatataaaggatatactccgagaagtattcctcccttctgtacccactccatcttgttcctcctagccagctcttgaagaggcggaaattcactctaaacaggagaagcagcaatgagaacttcaagaagagatataagcctcatccaanatcacctgcagaggaggacgagggaaattttatatgggaacaattatctgaaaaatagaatgtcctcatttgtatgggcaaggctgggttgcaaagaagtcc

SEQ ID NO: 972 - DNA, 442 bp, Homo sapiens
  misc_feature 294: n = A,T,C or G
atacgtgaaattccggtaataagggacaaaatggttaagctcttgatttgagactaaggatggagatggggccatttagaatgcccagattcaagaggcaagtagaaaggagagttgacgaagggtcccgagcagggacagctggaaaagcagagctggtggaacttggagagctgtggcttcctgtggttgttgaaggtgacggtcatcttgatcctggctgggcagtgctggagcagcttccccacctggggatctcactggctatccttctcctcaacttggatgtttagntggctttttatttctttggttattggtgctattggctttggttggggggttaatttcttattttgggacttttagcacataaagttggagataatgaatgggaacagaatgggaaagagtggatataatgatacaccacataccctcc

SEQ ID NO: 973 - DNA, 440 bp, Homo sapiens
agttttcgaagaactccaggaagtggctgcagagcaaagtaggatcctgatactgagctcaagtgattcagaatgaaaagaccttggcacagacctgttaaggaagctccatataagggccaccggggttggctgagtcagaataccagccatgtggcatgtcgcatggggcaagagctgtgctgcccatgggagtccagagaaggagcacactaaggaccaacaccagcatttgctctaggggaagcctgcagctatgtcatgaggaccctcaacagccctgtgcagaggactatgtggcatgaaagatgcctttttgccacaaaccagccccacttgccaagcatgtgaacaagctaaactgaaagcagatcttcagccccaatcaagccttcagatgacagtaacctcagccaatatactgactataacctcataaa

SEQ ID NO: 974 - DNA, 426 bp, Homo sapiens
  misc_feature 337, 349: n = A,T,C or G
actcttttgtgttaggtttcctgacaatgaaagagatactagaatcaatgaagaactaccatgatctccacagcatcccctcctcgtggatgggggacaacgagatggttgctttcccagagctcctgtggaggactgtgaagatggtgactgcccctcaatgtatcatcttcacaaacatttccttggtgtctgcagagctgaagacactcattggtcgtcctttctgggaatgcacttggagataatccccatcaagcgcattttcatcgcaactgagtctagtgcaggcatcaaattctgagcaacgggactattaaggcagccaccatttttnttcaggttcagngcaatcaccaatatggtcactgaccaagtccatcatcttgagtccctccaacagctgcaagttcctgttcttgcctc

SEQ ID NO: 975 - DNA, 426 bp, Homo sapiens
  misc_feature 314, 334: n = A,T,C or G
ctttcataggtcactacaatccagtgccaacacagcattgggtggatcccatgagatttcaaattccacaaagaaaaaatctacttggtcctcaacattacttccaagattgctggagttcactgtaccaataaaaactcatggacaagaaaacagaaactagaagtgaaggacttcaatatccaagaagatggtgtagcctcaagatagaaaaagcccacacttctgaaacatcatttgaaaggctgctgaagacctgcatcacatgaggttatcaaactacagcccacagaccaaatccagcccaccatctnttttgaagggcaggttgccncatcatgaggatatcaagacatcctatggtgaggcctgtgtgacaggaaactgaggcctcctgccaaaagccctgcgaatgagccatcgagg

SEQ ID NO: 976 - DNA, 427 bp, Homo sapiens
gtgcccagacactgcttcaggagcctgaggaacgcagtggcttttctatcatgacctgacctgggcttctcagcatgaagacagagctgcattcctgggatttctaagaagaaaagaagattctgtcaagcctgtgttcaatcaaaatatcctcccctacatgactgccccccactccctgccgcaccacctttctttttctgtttttttattgctgttaatgtttaacatgaaaataagaatgatgtaacccaggatccagaagccaatacaaactcaaagcaatttgagtttttaactttgccctatttcattgggggggaaaccaaggtcattaagcatgactttggcaagcacatcaagtgtgtcaacacatcttaaattacagctgtcaattagttacctgaagacttaatatgccaagctc

SEQ ID NO: 977 - DNA, 439 bp, Homo sapiens
  misc_feature 327, 337: n = A,T,C or G
gtggggtctttcactgggatggcctgtcaaggagcaaacgagatcagatcagagagaacaggagaaagagctctgtgcatgtggcttgctgtacatgatttacaaaatgaaactcttcacactgaacctgggttcatccttggagcaatatatgaaagaaaacagaaaacagccacaggagcctggagggacagaggagctggtcgctttgtggaccactgtacacctgagaaaggtgactcttgaaaggaaaagaggttgcttgacgtaccctttgaagttcacgggcactgcaaagaatgcatttttgtagcttgatccaccttnaaatgcccanattcatccacatctgcagcttatgtcacagggctggcagctaacagaaaccatcagatctgcctttgttttcttatcaaatcatatgtgataatgtcacaac

SEQ ID NO: 978 - DNA, 443 bp, Homo sapiens
  misc_feature 415: n = A,T,C or G
aaaagtttgctgacgcctgatatggagcactagaaagaaattatttttccaagcatcaacccggaagtcccagcataccgagggtggcagacatcatttcttcaatgaacttagtatttagaaagatatcttcactccaagcatcaagtcttttctgtcctgcaaaagtcttaagtcaaaccagaatccactagtagagggcacctttggattcaacagtaaaaggagaatctacaaaaccagctcatcaaaaggatattgaatgaagctatgatacctgtagcagttactgccattttggacccataaactgacaatcctttaacaattaccaggagggcagagcggaaagaacattgatgtcatcactgagttgctggattaccttactctagaaatagccaactctgcatgnttgggtatttttttaaaaagtcttcccc

SEQ ID NO: 979 - DNA, 433 bp, Homo sapiens
  misc_feature 313, 315, 339: n = A,T,C or G
acacagagtctcactctgttgcccaggctggggtacagtgctgcaacgttgtccaagatgtctggaactcctggcctcaagcagtcctgcagtcttagcctcccaaatctcttggattataggagggagccaccatgcccagccctgcagttctttttaatacatcgatggtgcttacatttggcactgaattgttctgccattatggtttgcatgaaggagaagaaaaatctccttgaacacacggttaaattgataaatttgaaaagatcatatggagttgcaagcactctattgataactacttatttgngntttaacaactattttccatgactntcctaccttctttttccaagtcaatttcttaaatgaccaggacatcatacaccataatccccatatacacaaataacaaataaacgttctttta

SEQ ID NO: 980 - DNA, 386 bp, Homo sapiens
  misc_feature 357: n = A,T,C or G
gaactatgcccaggcagaaaaaaagttactgtaggtgatgaagccagtgctccctgaaccaaataaaccctatcgacgttaccgaactgccgggcaaaaccagagcaactcacttacttggaaggtgaaaaacacttcaacatactccaggcggcaaccgacacttaggggccaggcagatgaaacaccatttgtttaaaaagtctattatttcactgtctcttcaacaaagggggaaaactgagtgattaaacactgagataatgccccccttactaaacctatgattcactaataagcagggtcaatggccattcataaactttaaagaaaggaattaccgaagccccttgcttnacaaaattcccccaagaaacagaaagagc

SEQ ID NO: 981 - DNA, 260 bp, Homo sapiens
actgaaaggcagagcaatgagaagcagaactgcagagacaaggattccaggtgcttggaagtgagggtggagccagcccgggaaaagattcagccccagacggctgcaccaggtggagcaaagatgtcttctcttttatacatgtcaactagaaggtgacaagagacaggagcccatgatcttaaagctccctgtgttacccagcacccctgtaagatttcctaatcattcttttataattaaaaaaaagatattttcat

SEQ ID NO: 982 - DNA, 426 bp, Homo sapiens
  misc_feature 323, 344, 360: n = A,T,C or G
ctttatacaattattcccaaatcttctaaactgacagtgagggagagtaatttgaaaggactgctcaactcaacgtcatttgaagatttgcaccacagctgcatttttccaatttcctggcatctattctgctctcctggacttttcaaaaacaattgtaagtggatgaataaatataataactgattccattgatactcttagaccatcctttggactttctgcttttggacattttacagtttaaaatttatttatcatctatcgatgtttcccaaagaaggactcaaagtacacattgtcaaagatctcatggatctaantaagggccggggaaccaggtncagaatcatacattgnctctacacagaggggataatttctgaaggaaagaagaaagtaaattccttaatcacccttctggcc

SEQ ID NO: 983 - DNA, 440 bp, Homo sapiens
  misc_feature 370, 417, 422: n = A,T,C or G
gtcctcaacaagttttcccttctcaccgtacagcctgtatttctggtgacactgtgtccccagaaccctaccctgcctcctgagaagcttgactggtgaggagcagggctgacttctgcttaggcccaggaacatccagacccagcactgcctacttctggattattggggcagacatggctgctggatgccatgtgcatgtgcagaacatcagcaaatggacacagtgatcctgaattgtatgcccgtatgcagcggatcacctctagccagcacagcacttcaactgacaagcccagataccacccacagtcaccaacatgcagaaaactttgctttaacatgggagagacgggtctccatgttttgnctttaagcccctttcctgaacatcaccacctggagcctacattctgngctgnattggctccctgtaaggt

SEQ ID NO: 984 - DNA, 439 bp, Homo sapiens
  misc_feature 325, 350, 415: n = A,T,C or G
tgctgtgacagtgtcttaagtagggcatgttgatagatggaaaaggacggcaaactcgaggtgctgattcaggaagaagcagattccaagatggaagagaaaatatcgagagaaatatgccgagagaagaatccaggcagaatggaatccaggcagaatggtgaatggaaggttcgggtgaccaagagaaaggaagggtgactcagcaagtctgtagtttcagctcttgtatagtaccgttatacttgaaaagctgaagccttttctcggggaagagtcagaacggcctggagggcttgctaaagcgctgctggcttggcccccncccgctgaatgactaatggagactntgagggccggctggtaatttgagtttctaacaagccctgtttcgatgctggtacagccgatctanggaaaatattggaacaaggaaaaa

SEQ ID NO: 985 - DNA, 439 bp, Homo sapiens
  misc_feature 6, 199, 207, 338, 424: n = A,T,C or G
tccggngccacttttatctactggaggtccccctgccacatggcctcatccaaagcagtttgcttcttcaaagtcagcagcatcaattgctctacaatttggagatatcagacgaacagagggaaaatgcagtcagtggtctaaagctgccccttaggaaatctaaggctatatctggttccataaagtctttgatcantcagtcanaacaactgcagcattcctgccgctcagaataccttaatggccttagtagctgaggtcctcacagcactggcaagagcaacatggcattggaatgggaggactgaacaagacggaagaaacccaagactctntggtcattgcagaaggaagaatgagagcccaagcctgaggaagataaaatgagatgatttggcttaatatgaattaaggcagctgncagtggttctgtaaa

SEQ ID NO: 986 - DNA, 444 bp, Homo sapiens
  misc_feature 91, 307, 335: n = A,T,C or G
ggcacctggttttgtgtagatacaactcagggaattatctccacactgcatctgccatgatcacctgtgagcacctcctcctgaaacccgncttcacgtcaccttttaccaggccgaccctacttttctccatctgctaagaagtgcagctctaccactggaagcatccacttcggtctcactcccatccctagtgctaaaggactctctaagagagaatgtcagcacagttttgacagaaacactctaaaactcctggatattccagaaaaattaactctgggcaaaagaacattggcatcaaagnaaagctcaatttatacaccattagccantttttgatagctataaacctgacacgcaaataggaatattttatggcataacactaccgtttacattaaagtgctttttaatagaatatgtaatttagaaatataaaag

SEQ ID NO: 987 - DNA, 442 bp, Homo sapiens
  misc_feature 6, 8, 335, 340: n = A,T,C or G
atgacngntttatgtgctgcccaggatgagccactgtgcccggccaaatgagctatttatgatgatcataaggacacaagataaggaaatccaatcagttgctacgtgctgatgattctgattctggccctgcagtatcgcttgcatgcacctcctcctccctgtgctcactgctggagaaaagagaaccttggctgatgatttatggatctacaagtaatcgaagcttaactgccacaaaaataactttatccagtcctccccccctcccctgcaccttctctagttagcgctgtaagaacttggttgctcaggtggaaggcatataaaattgnattgnatttgaataagctccccaggtagcacagtaatgtctctgcacttgattaaataagtcaggtcaatttttctgcaagttttcctccattgcagcactaacatt

SEQ ID NO: 988 - DNA, 219 bp, Homo sapiens
  misc_feature 2: n = A,T,C or G
gnacattgatacatcccatgaatgaagaatatggagaatgaatgtgatcacttacagaatattatccagtgacatatatgttaaaaaactatgacatttgaacccctattaatcataaaactgttcatcttttgaaaaggagaatgattctttgtaaattcaaactccatctgtattatcaataagagtatctcagattgagtttcacacatcgaaact

SEQ ID NO: 989 - DNA, 178 bp, Homo sapiens
gaattctccagggacttatcagagttgctggaagaaaacagctgaggattgagcacagtgaactaatttcctcacatctttgaataagcagaagttggtgaaaaggaatgtaaatattcttatggtaaaatgagttcaaaaagaatccttaaatccttaaaattaataaaccaataaa

SEQ ID NO: 990 - DNA, 536 bp, Homo sapiens
  misc_feature 503, 521: n = A,T,C or G
ttttctcagacatcaagcagagccttccatctcacccggcctctcaagaacttcactctcagcatctgccagagtctaccttcctcacttctaccctccattcccaaagagcaagaaggtggatatgtgccagaaaaaggctagagatcctttacctcagtcttttaatttttaatcattggaaagagaaggaatgagttacaggagaaagaataatggatttgctgtcagaaaccaagatgaagtctgattctgccactaatcactctgtgactttgaaccactcaccaaaatggattaatctcataaaacttcgatatcctcatcagtaaagcaaaatagcacacttgtttactgtgaggtgcaaaattcgtcaaatgcctttataaaccacatggtgccctgtgaatgtaaacagtatgatgtggattcctctaacactgatggcgaagtggcactgaaagggcttcttaagcttcataaacgcctacacaaaaaccggncattatgccctccttttncctaaaaagtcttca

SEQ ID NO: 991 - DNA, 270 bp, Homo sapiens
gggaatactgcgaaggagcaaactgcagcttgcctggaaacttgcagcaagccataccaactccaaagttgaaaattaacaatagaggtcagcctaaaaaagcaatgtttttcccactactatctattataaactgtgctggatataatcacctttggggaatgaaaatgtttccccacactatgtaattaaagacgaaggggaagaggaggaaaggagaaggggagaaagtatataccaaaagaccaataaaatgctttcaaggagatt

SEQ ID NO: 992 - DNA, 286 bp, Homo sapiens
  misc_feature 1, 82: n = A,T,C or G
nagccaaggtatacccatgctgggccatcctccctcaattaaatgcagttgtgcaaaccaggaaggagagaggagcatgcgnctgactgcacgcggttaacacactgcggcgcccccagaaacagtcctcctgcagcaggtgcctcagaaatgagcttctctctccaggctcatgctctgacacttgactttctcagctgtaagatgggaataacagtggcgccttccatgtagatatatgttagggttgatgagatggcgtctggcataaaatcaatgctcaagg

SEQ ID NO: 993 - DNA, 137 bp, Homo sapiens
  misc_feature 1, 68, 82, 90, 93: n = A,T,C or G
ncagtgttaacgtaaaccaagagccccacaagaagtcattaaagctgtgctgttaagaggccagagcnctataaaataggcnagaaacanggncttgagaaacatgctgctgtcctcaaaaacaaccttgcaaacac

SEQ ID NO: 994 - DNA, 430 bp, Homo sapiens
  misc_feature 4, 387: n = A,T,C or G
tttnaggatctgaagctgagggaattctactgtgagggaaacccactgttcctgcagcagccagtgatttctacacagcaggagaacgtctggagtctacaggaaataacatcaagatttgtaatgaatcagctagcagaaaataaccctttcctaatggatgacatagaacggtacccacaagtcaggagcatgatctctcagggaaaaacatgtgcaatatgtggacagtactttataaccgtatggctggaatgtgttcgatttgttcctccaccaaaggactggaagataagcaagaatctgaagctggtgcctctccaagtattaatttgttcttacaaatgttttactcaacgtgaccctaacctctttggaattgctcangtgtagaacaggtgaggtgctcattcatagcctcactccactt

SEQ ID NO: 995 - DNA, 67 bp, Homo sapiens
gaagtgtaaaaggatacgaaatatttcttgcatgatgtcctagcaagaattcttacacctagtttgc

SEQ ID NO: 996 - DNA, 309 bp, Homo sapiens
gtaattcgaattcagctaacttccatggggtccacctgagtcttgagaagaactgccagaatctggaaggccaagctgctctctgcatcctcttatcactggtaaccacttcaagtcctttatgtatagaatgctccaggggggtgggtctggcactcatctctttattccacaatctccactggacacaggtcatgttttagaaacatttctctttaaatcagtcctttacttgattggagacagacaggaaggaagtacacacctgcactttcaataaaaggaagaaaataaaagtgcttaacattc

SEQ ID NO: 997 - DNA, 447 bp, Homo sapiens
atttagtcaatgggaaccccttcaagttggctcttttgtctttttggcatgtcccatcatatttggagtcttaagaatttacatcttggttatctgctttcggcattccactctcctagcgacggcttcaggaagtgatggatactcctgcagaagcagatctctgcccctggacagatggggaaaggctactgggaaggcagttagtgtctgctgcagtgcacacaaaaatgggaagcagtacgtgcaatgctctggaaagatgattgcggcaagagcttcacctaaaggactagtgaggacaggattgtatcaataggtattggttcctaataaacatcttgcacctcaaattccatcccagaatctgcttccagagaaccccatctataccaagaccctgatgatcccagtcatctcaagttattcctgctgaagttccactct

SEQ ID NO: 998 - DNA, 373 bp, Homo sapiens
  misc_feature 288: n = A,T,C or G
aactgtccaaactgatgacagcacagacatttctgacgtgaagaagaaagaccggctctagcacgtgaccagcattctcatttcccactcacattcggatctcggctctcaggctacattctggtcaggatgaattacatgtataattcaaaatcaagaaagctgttcaagtacaacgtgtgaggcttctgccaacgtcgaaattcattaggaaccatgattttggctgagcacatggctctgttttgagctcttttattccggtgttattgctcattcacttaaagngaaatacgtgagtcagagacaagatctctttcccttttcatgtttctccaatttatctcccttggcataataaatatctcaagcc

SEQ ID NO: 999 - DNA, 432 bp, Homo sapiens
acggagtctagctctgtcaccaggctggagcacagtggcatgatctcgactcactgcaacctccactgaagaaggaattcatgaattttacaagtataatcaaagaccaccaagaaatttttactttttccttcaaaagctaagtgtagtgtagcaccccctgcccatagtctaagttacagaagaatactaactgcctgtttttctttctgtgttgtgagccttatctgttctcaccagtttcacattccttgaggctcagtgagttcctgctgcacctccctagcacagctgcaaagttacaaggttgatatgccgtatgttacagaaacatagtttcccaaggatgtggaacatgtagtatagataaatgtaaaagactgatcaactgcctttgttctcgcttgtgtaagtagacttcatgaatcacag

SEQ ID NO: 1000 - DNA, 300 bp, Homo sapiens
actcggcagactgattaaaggacagggtcacccatacacaccggagctcagaaaaagtgcacgtaccttccacacagcgacagccctcttgcagcacccgtgcatacatatccactttggactgagaaaggagctggtctccagtcagctcaagccacgtgacctgtttcctcccacttcaccttctaccatgagtaaaagctccctccagcctccccagagaagccaagcagatgctggcaccatgcttctggtacaacctgtagaatgtgagccaattaaaactcttctttataaatt

SEQ ID NO: 1001 - DNA, 307 bp, Homo sapiens
aggctgtacatgctgcctccttggtcctatgaaggtgccacgaacacaacaagctacaccagggaagaactggagtgtatgttccttatgatacacttgaaagcccaactgcagggaacctgaacacatggatctgcatgctagtgaaacactgcacgctttatattgcacatttctagtggaaaatactatgactgtacctggcaatattttcataaatattatcctggaattccattcatattcttagaaaataatttagcaggagcaaaaaaaaatgaataaataaatagccatgttcaaaaac

SEQ ID NO: 1002 - DNA, 285 bp, Homo sapiens
atgcacgagctgagatggctgaaaaccacgaagtaggatctcatcctggcagtggctgaattacaatgcaaattgaattcccaaccttgcagaccatctgccgttaaaagtgagggcatagattgggaaggaattctgcctttggactccgatgccaacatcagctcttccttggttctccagtctgtggcctgatctgcagatttcagacttgccatccccacaatcgtgtgagttgattccttaaatataattctttaaaataaatcttccccctttctctac

SEQ ID NO: 1003 - DNA, 73 bp, Homo sapiens
gtggggtctttcacagtgagtcgagatcatgccactgcactccagcctgggtgacaaagcgggattctgtttc

SEQ ID NO: 1004 - DNA, 277 bp, Homo sapiens
gctcaactccgaatggattggattgcgagtctgcacgtgagaaaaccgtttggcttggcttggacccctgccgccccccacctcctccacacacacccagtccaggggtcccctttatcaccctttgcttgcaactccaaaagaagttgcccacctcctgagtcacaacacaaggtcgaataattcctctagatgaaagatcagtttcatttcaaaacgagaataggttcctttttttattttctccacatggtacaaaataaacagaatttgcttt

SEQ ID NO: 1005 - DNA, 445 bp, Homo sapiens
  misc_feature 174, 184, 188, 225, 232, 245, 278, 302, 303, 304, 312, 315,316, 327, 330, 356, 357, 361: n = A,T,C or G
gcacagccaatcaaccatccatcctctcctcaaccttccagaagactgtgagtcctgagagcatagaaactctcctgatgttgctcccagaccgtgacccgtgctggcaaagcttctattcccatgtggctgcatgtttcataaggagagctactaaaatgcaggaaagcacanaggcttaatngctnagctagatgggcactcagccaacaccgctgttagcanaatgaanctcaatcttacanaataagtgctgaacctcggctctggatcgcccnagccccacatggattgcgtgtgtnnncgggggangannttggatatggnagnctttcttttcactcttttgaaagggnntggnaatctatgggttactagaacattttattcttaatataataatcccagctgcaaaacaacattaagagggaacactgcacctatc

SEQ ID NO: 1006 - DNA, 115 bp, Homo sapiens
gaactggtttgtgtcctggggattcagcagtgaacaaagtaaacaaaagtccttgccttcatggagattgtattctgatggggagagacaaaaataaataaggaaaatatgtggt

SEQ ID NO: 1007 - DNA, 180 bp, Homo sapiens
gcctggatcagctcaattacttgcctactctggacctgagcagctgtggataaaaacaactggagaaaatcactcaacagacagactcaatttactttaaaatatgtgatttcaaacctcaaatgtccaactcctggcaactgcactatattccctaataaacttgctttcccaaactcc

SEQ ID NO: 1008 - DNA, 393 bp, Homo sapiens
atcttatatcacctcctatcattggtgccatccccactgactgcaaaaccttgaaggaacgaagataaacagcatcccacagtcaatcttactcacgggagttaaccctatcgaccgcatgtgcacaagaccagacgaatgaccaacctttaccccttgcctcatcataatactaaaatccccacccgggaagggactttgctgccattttgtgatcctgcggtgcgggtactaacctgcttgctcactgcacctgtgcgccctgcgctccactctgcacatgtcacgacactcacatagctcatgtagatgcctgtcaaccttcctagaaacaccagacataccctggggagccagccagagaactctccctccagtgctgtatcccttagc

SEQ ID NO: 1009 - DNA, 431 bp, Homo sapiens
accagtgaactgaggcccctatccaatgtcaccttgttggcatgcagcagaggtggaatcaagaagccaactctgcctcccaggataatctaccaccataacatggtgacctagcatgctgcagaagaagaaaaaaaccaacaaaatacatgtacaaaccaaaatatagtcatagaattgtgtgagagaagaatggaaaagacttactttcacatccggaaggtcctgttacaattccaacttttctttgtacctgtgtaaatgtaagcaggaatgattttgttttgctacaaattcaccttgtcatcaaggaaaggacaatattactagatgtagtccaagatattcaactgcacgcaaaggtaaaaagatggtcatgatgtttgtactcaattgcttcaacaggtatgtctccagtattccttaactac

SEQ ID NO: 1010 - DNA, 277 bp, Homo sapiens
gtgttgtgctgatgcaggagacaaccgcgaagatggggacagaatcagtaacatcgacgtaagggaattgaagcagaagatcacgctgcctgcagacaccaggaaacgccaagaccccccttccacgaaccaacattcttccaccctctccaacttttttctggaaccccttcacttccaaccgccactcaatgtacacttcactttctcgtgctcttcctaagagagtagtgttttcttcctccccaccgagaaaaaaaataaaagcaacaactgg

SEQ ID NO: 1011 - DNA, 434 bp, Homo sapiens
cgtcatgttcctgcaaagagaaaaataaggaaaaaatctgcaaaacattgaagactcatgacccactttaaaaacataactggatacatcacatgaactcaagaccatgactatggaggaagatttaacacttggcaactcttacaacaacaacaacagcaacagggaaaaacaacaacaacaacaaccgaagagtgcaaaaagaactaatgcattctctaggtaagcctggatggagcctctaagacctaacaggatgtctgagattccagggaagtggcctgtgatctgtcagtaaacaaataagaagctaatacagctttgttgtgttttctgattggcatggttcttgaactatctcctacttgtagttgcagacaaagaaacaggagatgaattaccatgttctaggactttgtgttcctttccaattc

SEQ ID NO: 1012 - DNA, 407 bp, Homo sapiens
gttcacaacagtgttatggcgggagcagggaggcacctacatccattggacccatcctgacagctgggaaggatgtgtccagccacccagggatgtgcatctggcacccacctcacaacagctgttctaaccacgtaagaagcacaagggtcaccggttactctccatgagaacaaaaggccaaggatgcagagataattgcatcaaagggattcaacttcctggatgacctcattccaaagatctgcagagcccagataagcatcccagggttctggcagagggcccctccagggacaggaaggggacaggaagccggctttccgtgtctgtaccgccttccttgggaaggataggacacctgtggccatcaagtcatgatgccccatctttctgaaacgaaaaca

SEQ ID NO: 1013 - DNA, 200 bp, Homo sapiens
gaggagaactggtggctttataagaagaggaagagagaccaaagcatagcatgtcagcatgcccagtcccctctccacgctataccctgtgccacctccagacacttcagagaccaggaataaggccctcaccagaagtgccccctcaatcttggacttcctatcctccatggctgtaaggaataaattccttttctttc

SEQ ID NO: 1014 - DNA, 128 bp, Homo sapiens
atgaaggaaaagagggagaagaaaccagctgcctggaagactgaccctctgagatgctctggagccgtgcagttgttctcactggcagatcagtcctgtccctccaataaaagagagggtgatcttgg

SEQ ID NO: 1015 - DNA, 142 bp, Homo sapiens
ctgaaagcaaagaactctttagatagtggagtcacactggaaaaagcacagacccttgagtgtactgcttggaggagagctaccctggagcatttgctccagattctgcatgagcaaaaaataaacttttgctgcataaagt

SEQ ID NO: 1016 - DNA, 149 bp, Homo sapiens
acacttaatctggtgttcctgaggctgacctattggaatatcttgctgaagaccacgtatacaagatgtgaacattcatcattatgaggctgaatgtaaaatacttcattttataatgaagaaagtcagtaaaacaatttccagcccag

SEQ ID NO: 1017 - DNA, 166 bp, Homo sapiens
  misc_feature 10, 14, 19, 20, 59, 69, 78, 90, 112, 120, 125, 141, 144: n = A,T,C or G
gaagaagaanctcncctcnncatgagaccgctgtggggatctggcactgtggttcctgnatgcaaacantggtctggncgtgcctgggcngacaatacccctttccgtgtcncgggaaangcccnccttaaaaaaactganggngttgaaaaaccagtaaaccctc

SEQ ID NO: 1018 - DNA, 113 bp, Homo sapiens
  misc_feature 9, 11: n = A,T,C or G
accctgatnangagaccagctgaggcgaattatgagtcaactaaaattatccaaaagatcattttaccgtaaagtagttgctgaatgtacacgaaatgtttagaaattaaatt

SEQ ID NO: 1019 - DNA, 250 bp, Homo sapiens
  misc_feature 6, 73: n = A,T,C or G
cttctnctgaagaatgagaacacttgccagccctttgcctatgttatcacctggaataaactggatgtgtctnaatggaacctgcctcctttggggagcgcatactcccgccaggtcaccacagccaccatgaccacctcatgcctcccatccacctgtttcattaatttgtgcctggaccattttcagttttctggatgacatgggtgaggaggaggaaactcaggtaaatgataaagtttcgactatc

SEQ ID NO: 1020 - DNA, 387 bp, Homo sapiens
aagacagctgaatggttccagtctttcagtcctgctcctggccaacactggacctctcaaagtctagccaactcctcttccagcgccttgataaacaaccccctcatgctgggaaccacagcagtgggctgtttttctccctcatgcaccccaggaagcctctcctctttgcctgggctttcttcccaaggccttagctgccaacccattttacacccatgcgaagcccagtcagtcacctgaagaaaaggagactcacagaaggcccaagatgaaagactctttaatcctgtggctttttgagttttgtttttagcaggaagaccttattttcaaaacaaattgttacacagaatttgccagtttacagaacagatgaataaagac

SEQ ID NO: 1021 - DNA, 216 bp, Homo sapiens
  misc_feature 10, 12, 174, 203: n = A,T,C or G
gcctaactgntncaggagtgtctgcttgcatggacaccattgtggaaaccttcctccgcacctgtgccaggctcttgtggatgccatcaacaaacccctctgacacctctgacgggagcatgtgaataacaccgaataatcacaacaaatcctcctcatcataaagccttgcgnggactggcactcgcaaatatttaaataantattaaaacactg

SEQ ID NO: 1022 - DNA, 541 bp, Homo sapiens
  misc_feature 1, 7, 8, 12, 16, 461, 466, 468, 486, 500, 523: n = A,T,C or G
ngtaatnnaggnggangccccctggtgagggaactgaccagcagactccagcagctgtgggaaaactctactgatgacaggcaagaagccagactgctcagacctagagctataaggaaacctgagtaagctcgggatgaagttatccccaatcaacccaccaggtgattctgaagccaataatttggtccttggaagtttgtgctgtatggaaaaaaatcacccttcttggctgacatctgttttgctggtaacacaaatgcaacttattaatcatctctgggtaagcaagaaatgtaatcctgaaaatggcttacaagagaaaatcttggaagataagaccgtaacactaaaacgcctctccagatgccttaggaacatccccaagcagtaacagataaagtccctccataggattcttggctatgtttaagtttctcatagaaaaaaataaaataacnaaacncnaaaaaaaaaagggcccgnggggccaattcagnttggacttaaccaggctgaactngttaaaaagggggggggg

SEQ ID NO: 1023 - DNA, 492 bp, Homo sapiens
  misc_feature 21, 28, 33, 34, 43, 46, 47, 56, 60, 61, 62, 65, 73, 78, 90,238, 447, 454, 478: n = A,T,C or G
gacgtctggggagctcctgcnttaagtnaaacnngaggttttngtnngcccccagnaaannngantcggccanacccnaaaaaatcccancctcaccaagagatgacacgtgacctggtgggcctcacccagggcatacagctttcccagctagcaaacaaacaagccctggtcacagcggttatagctggctcatggtcgctcacagacactctgggcatgcattcccgtgacttanaaaagaggaggcctttggaacctgccagtgctgtctgctgattgtgaggtgtctggaacctggggccccatggcccctccacaccagcatggtgctctgcaaaggccagctgctcttcatcctgtctcaatgatacacagtttttttccccaaaactttagtagcgccactctccctatcactcgtcttttaattttgccccttattgntccttanattaaaaaatatcctcctttcatnggagggttggacct

SEQ ID NO: 1024 - DNA, 273 bp, Homo sapiens
gctctgagtcaatacaagtagggaagttcaactggttccctgggtgttcattcctggttggagagctgtttgggaggctgggaaggtccattagaagcataattctattccagaggtggcttggcagatggagcatatcatgggttaatttctcagcatgtcacagaaagcaattcctactagacctgaagaaagtggcttctctcttaacagaatgttatctttttctagagagtaatatgtttttattaaataaaaagcatctaatagtac

SEQ ID NO: 1025 - DNA, 495 bp, Homo sapiens
  misc_feature 377, 402, 406, 416, 433, 438, 470: n = A,T,C or G
attgcaagcccccacctatgttggttaattctgcttcacatggaagagacagccattgggccagccctgaacaaagatccctgtcaccaagatccactgctcctgctgtggtcaggcaaagagaaggttatgtctcctgagttctagttctccgtcctgaagtccatgtaatgtgagttacaagccgtctgcagaggtgagcattcgactctggccagctcaagttattcggcaaggtgtgattgtccagtcttgaggctgtttgctgggagaagcacgacataggctattgccagtgccaaggagaacaatcctaataagactgacagccctgcccaaatgacatggcattgaaaatgacacctgactgaatgaanctgacccttgaggtaggcacttgancttnttcaaaaaanaagggagggaccagccncagangaggcatggatccaaacttttgggatcctcanaaatgtgtgaagtgactccttcttt

SEQ ID NO: 1026 - DNA, 468 bp, Homo sapiens
  misc_feature 373, 404: n = A,T,C or G
attttcctgtagagttaggaaactgacaactagaagacataaatatctgttccaactggctgctgtacttctgtgtatgaataaattaatgttctgtttgaaacatcagtctaagggagaagagaatgtacatgcagatagcctttctatcgacctctataaccaagacggcaagctttatgaaggaggagatgctgtctcatttacaagagccaaaagcagtgttccctaactcttggctgagggatttgccatgcaggataactcatatactatcatgtccttagagaagacatcatattcatttgtgttttctcggagtaaattttagtgccgtgataccatttgggtattcattaatatttatcacacnaaggaattaaatgggtctcccgaacctggcnttaacctccttgctaacctaatattcattcaacaaatattaactgggcatcttcaatggggcag

SEQ ID NO: 1027 - DNA, 176 bp, Homo sapiens
gatcatgaatggaatgacacactctgaaccgaagagaccttacagatcatctagttctccagccttgaagatggggaaactgaggctcaaggaaggcatgtaaacagcaacctcgggattccatttaaattctgcctctctggatctgcttcctgatatataaaatggtaataacc

SEQ ID NO: 1028 - DNA, 104 bp, Homo sapiens
actggcatgaaatgacagatatacagaggacccttgaacaacctgggtttgaactcctcaacatggacacttatacacggatttttctcaataaaagtgacacc

SEQ ID NO: 1029 - DNA, 472 bp, Homo sapiens
  misc_feature 15, 50, 53, 70, 86, 122, 139, 144, 149, 153, 158, 162, 187,202, 213, 232, 247, 250, 251, 271, 298, 332, 334, 363, 394,402, 412, 450: n = A,T,C or G
gggggggcttccttnctttagttccgaactgggggggaggaaacccccanaanttaaggggtgggtttgnggaacttggcagcccnttttttttaccaactaaataaaaaaatctggtattncaaaaacatggaccttnattgnggccncccnttttncttnattaaaaaaaccaaaaggggggccnttggaccttaaaggnactaaaatggncaagggggtggggaccaanaaatccaaagtttgnccnngtccccaccaggttttttgntttttaaaataaaccccaaatttgggncaaaaaaatctttccttcaaaaagaccaaaaaancncgattgaaaggggggaaaaaatggccccnttttggggtttaaaaattttaaaaaccaggnaggacctnccccttttgngtccttttttcaaggggttcaaaataaaataaaaaccnatttccttagtggattttaagg

SEQ ID NO: 1030 - DNA, 443 bp, Homo sapiens
  misc_feature 355, 367: n = A,T,C or G
atctcactgaagagttcttctgtgcctggaagacttattttcagtctgagaagaatgatttttcaatggttctgttgaacatgcaattctcactgaaagcaccagatttccgcgtaggagggactcgggggcaacgatgcaattggaagaactgcaccgaaaatgacgatgtcttctcatgcatatgaattatccaaagtgtgggaagatgcgcccccactggagtacgctgaagcctttaacccaagtacatttaatgctgcgaagccccgagtgaggcaaaggtgtctttttattttagaagacatttaggacagttcatgtcactctgcacagatgcactgaaattgattgngggggcaaactntaaagagagcttatgctccccaaatctgtttccgagccaggtaggatgatgaattctgaggtgggactggaggggt

SEQ ID NO: 1031 - DNA, 254 bp, Homo sapiens
  misc_feature 111: n = A,T,C or G
tctctcctctggatctgagctaaaagaattcctgccttactggaaaaagagtacagcagagtgggtagaagatcctgaagttggtccttgctccttttcagaccccaacgntctcagtctccctctttcctggctagtgcattacaggcacactaaatattgttggtggtgatgatgacagaaattaccttttcctaatatttcctataggtaattattagaaaattaaaagtagccacttgcaaattaaaaag

SEQ ID NO: 1032 - DNA, 120 bp, Homo sapiens
aatatataactcgagctcgtgttcctgtcccaggagagagagatgaccctcttcttggtgctttcccactttagttttcatcttccataatttacgaataaatgcataaaatggaaatgg

SEQ ID NO: 1033 - DNA, 124 bp, Homo sapiens
atctcggagagaaacgcatctatcagatttttactgataccgaggaagaagtatctccctcttcgaattgtattgtacatttgcattgatgtggttattttcatctaaataaagtcaaacaggt

SEQ ID NO: 1034 - DNA, 373 bp, Homo sapiens
  misc_feature 323: n = A,T,C or G
gtggggtctttcaagatgaaatcagagtaaccccatggaggtcctgagtcacggtggcaccttgccctgcttgcctaacaaagacctcctgggaggaggacccagaagagggcagggctgaagaagagtcacagctgaagaatgtgactgtttgccaggaaagccactttctttctgcagcaggattagaattcctacaactccagccaaaggaactgggttgggaagcgatactgcaagcattcatgtgcttccatcctggtcttcagcttagccacggtcctgcggggacagtgagtccctctctgagtggccaggacctncacctggcccacaggaagcctttaccagcaggaagcgaaacgggatgggg

SEQ ID NO: 1035 - DNA, 480 bp, Homo sapiens
  misc_feature 398, 410, 413, 416, 420, 458: n = A,T,C or G
tgtcattgaggagaatttgcctaggagatgcaaagagagagaagcccatactttgagggtggaagcccctccaacaggcaacatgactgcagcacaatcaactatggctttgctgatctcgtgtatcatcatcctcatcatcctcatccccgcaattgcagcaaacgtccagttgtgcacttgctgctgatgatgaataaatgtatagaacaggaaaaaatgtatctcaccttcagacagaagatctctgccatcatgtgagagagagcctgagttagcctgctggatggtcaaagatgagtggtgcagctaagtgaaagcctgctgacttgtagacatatgagtaaggccatgcttgatcacctggctgccagctggcctgccaactaattggaggnacttggaaagantcnacnaaanatcacccccccaggtcaaataaaccccagccccctccntgagaatgatgaactaaataat

SEQ ID NO: 1036 - DNA, 100 bp, Homo sapiens
aaagatgacagaagaacaaagatgaaggaggaggccactggtttacaggaagggtaaaggacaacgactatccagatttttcttccaactttactttaag

SEQ ID NO: 1037 - DNA, 183 bp, Homo sapiens
gcagcaaccacggtcgtaatgggatctgtgactgtcaccagaagaaatcaccaacagtttcgtatcacgtgagagttttgcaggtgcctccaaatgccgtccatgctcatcaacactgtgacatcagctgcggttctttaatgcatgtgataaggaagcacgtatattagaagtttgggtttt

SEQ ID NO: 1038 - DNA, 144 bp, Homo sapiens
aaaggacttgtacctcccagaagttcacggaagtgctcaggacaacagaatattgtgaggccaacacagcaaacagagcaacgatgagcagccacttttgactttggtttccttattcaggaaataaaacagatgatctgacag

SEQ ID NO: 1039 - DNA, 140 bp, Homo sapiens
  misc_feature 46: n = A,T,C or G
gatctgtagagagacagcggaggcaaagatacctggagccgatcanagaagagatgcccactctgaaatggacacgcctaaggagacatcaaaatcttcaccaaaccctgtctaataatacagttaaatcaatatcagag

SEQ ID NO: 1040 - DNA, 442 bp, Homo sapiens
  misc_feature 344, 355: n = A,T,C or G
gagagaatctaatatactcattcacactgaggtgtaaggctctaagaagatgtacactgcctgcccagggatatatccagttcacctggaagctaagcaagaagaattaaaatacagaaatgggaataaagtttgcaacctctccaaccctttgttccaggctgctttttacgcctcaaaacttaccagattttgtctgcacctcccagacaacctcagaaatgtgtttcccaaaaatctctttccctggtcagtttctctgtcatgcactactttcagaaacccagactatcctctggcccatcagccctcatgcccagagacccatgccaagttaaagttgntcattgggcancagatatgtctccaaggcaccttctaaatctgtcaaggccaatttaggaacagaaggttgaggccagatgggaaaagttgggaaaca

SEQ ID NO: 1041 - DNA, 414 bp, Homo sapiens
  misc_feature 22: n = A,T,C or G
gaaacagaatgtctgtggtcangaagttccttcttgggactaaaccagttgaagctggcaaaatccatgatggcagcttactcgatctttgaagaacctctagcttcattatactccaacttccatactaaatgacactcccaccaatgccatgacagttgacaatcatcatgacagtgaccaaaaagaaccaaaaaaggacaggaaagaagtggctacttgattccaggaaaatctccatcctttcccaagaaaagcatgaatattcctctccttggttttaacgctcaaacctttcattaaagataccttgtgtctgtaacttcctgattctcaggagctgacatgttgatgtgtgagccacactcccacttctcatgtcatgaccatcgaataaaaactggtcttggtttt

SEQ ID NO: 1042 - DNA, 271 bp, Homo sapiens
actttgatgtcttcaaagcaaggcgagtgagtggcactcttcagacaagaaggaagatggcaggtgaaatcatcttcttctaatgagccctgtgctatgcttgctgatgtccttggtcacggagattttcagaaaagccatggccttaccagtgaaggttacacagaggccactggagtcaagtaattcattgctccttattacatttaggcacttctttatccatcatgcaggctattgggattaaaatgggtcctttcaacaatgagtc

SEQ ID NO: 1043 - DNA, 111 bp, Homo sapiens
ggataactactggatcagcagtactccagacagtgcttcaccagactgggtccctggatgatgaaagagtcccccctgcagtaccacaataaaaatgtagtgtgaatgagg

SEQ ID NO: 1044 - DNA, 473 bp, Homo sapiens
  misc_feature 399, 400, 406, 420, 422, 438: n = A,T,C or G
aaaccgagacagtacccactgccagcagcagatgggaagtctaaacaggagagactgaataaagctgacaactgaggcaggataaagaagagaaggaacaaagaaggagggggcaggaaaagaagccaagcagaacatgctagcctgtcgattttgtcttccattaaggcttcagcagaagataagaaaagctaagccacgtcagtgaagggaggacagcaggaaggctttcaggggaagatttgtggtgtggattcactcggcattgatgagagcagctccccagacagataccgagaatgaaaaaccaaaccagtgaccaggaagagaagatatgaagaaaaatataagtacatcttttattgtaaaaatgaataactataggctatagactggatnngggaancctaatccctaatngngatggaattgggaggnggggctttgggatgccattatttaataggtcaaga

SEQ ID NO: 1045 - DNA, 429 bp, Homo sapiens
  misc_feature 82, 138: n = A,T,C or G
gtggggtctttcacagtcaccagcatcaaaggagcagtagtggcagcagagtctcaaccctacagaaacctgagcgggtcanaacgttcatcttcatctagccaaggtgaaagcacccagaaaccaaggacagacagntgtgagagcaagctggcagcaaagggctgagctctgaatttcagtctggtagagcaaaatgattttctccttcagcaatgtcagaagaaccatcccttatttcaagacatccttacacatctgctgtgtgcaaaacctgcacacaggacgtggttctgaactgcttcttcaaaacaaagtaaatgaaaatttcagtggctccagcagtcgggactgttaggcatgaaacaatgagaagtacgaaataaatcttatatgcttttttataatttagtaacccattaaaaatcc

SEQ ID NO: 1046 - DNA, 489 bp, Homo sapiens
  misc_feature 158, 167, 169, 174, 176, 193, 194, 195, 200, 202, 210, 212,215, 217, 219, 225, 229, 230, 246, 248, 250, 252, 254, 266,270, 275, 278, 300, 306, 317, 330, 344, 358, 362, 364, 399,408, 433, 437, 451, 458, 460: n = A,T,C or G
gagcatatcctccgttggaaggaagaaagaagacaaacagcagcctgcatgcttttgaagctggactatcaacaaaggatcttctcaatcaattcaccactagcaacagaatgcaggcggttctcagaaatggctcacaaagaaacacaaaaaaaggntgtctgaangnaaaancnagaaaaggttcccttcnnnaaaangnaaatggancnttnancntttttngggnngcagaagtgccacggncntntnantgcgggtaattnaaanagggncanaacactttcttcaggccacccnagggangttttatattncccatataaaganacaaattcccacantgtgccttccttgnggtntntccaactctttgccaacaagaggccaacccggggngggcccccnccaggggaaaaaaaccttttggggngganccccctttgggcantgccaangnccttttgacatttcaccggcgggaagaga

SEQ ID NO: 1047 - DNA, 358 bp, Homo sapiens
  misc_feature 12, 33, 146, 154: n = A,T,C or G
ggatttcagacnaaattcagggattcttccccncccaagactgtggttcagaccacggtgacgtcttccaggcaccaggaagaaatacgaccaacctccgtaacaaatgagagaaacttcacctgactgtgttttgtgcatttggnttatgagncgttttaaaaacgtgtacttttactgctgcgttcaggttttcagccatagaatattctagaaaaaaatagtgataacatttatttcaccgctataaccctgaatgtgtagctgtgttttttaaaaaaacatttttttacaattgtagaatatgtaacatgcctccagaaacgtgccctaaacacaaatatataatttggcaaat

SEQ ID NO: 1048 - DNA, 177 bp, Homo sapiens
gaaaagctgaagatggtcagacctggtggcacacacctgtaatgccagcacctttgtgaggccaaggcaggtggatcgcttgagcccaggaattcaagacaggcctgggcaacacagcaagaccttgtctctataaaaaaataaaaaataaaaataaaaataaaaaaaagatcagtc

SEQ ID NO: 1049 - DNA, 536 bp, Homo sapiens
  misc_feature 21, 22, 25, 26, 28, 37, 38, 403, 433, 448, 450, 486, 502: n = A,T,C or G
gacgtctggggagctcctgcnntanntnacactctgnnagaacccatggctcatgaatcacccctttggcccaaggatgagtacccacagcagcaagctcttccattggaaaccacgctgaggaagacatggtcaagctctggcagcagatcaagctgttatggcaagaattcctggttctgcgtccccagcatgtaatatagaagatctgggagtggggtcttgggtctgtaatgtctgtgatatggctcctcacatcttcttgtgtagagtgtcatggccaaaacaggaataaccgtgtttgcccttctgaattccccagtaatgagtctgaagctagtctgaagctaccacagtctattttaagggattccataacatgtttgaattatatctatatggnagggactttcaatcagtagccaagatctgntactaaaattaaatncncaatttaatttccacaagctacatacctcccttcanaggcctgccaaaattnttaatggaggacaatgaaagttcgtaaccttctt

SEQ ID NO: 1050 - DNA, 374 bp, Homo sapiens
gtgaggaactgaaattgagcacttgaatgcctggaaccacatatccaaccaatggcagccattgtcctctcaaagccggttcacttgttctcaagacactttatgtcgagccacagctacttcatgtactgggagcaccactcctgaagaagctgactcagcttcaatgcaaggaagaaagtctgactagttaggtggaacatgggatctgtaaagcatggtgctgtgcgagaggtggtggaatgcatgggcaaatgatctctggagactctagcaatcattccgaagtctgtgttcaagcagtaaacaaacagcacactcagtaaccagtattcttgtaaagatggaggatggtaattacattctgtgactag

SEQ ID NO: 1051 - DNA, 595 bp, Homo sapiens
aggaaaggccacatgaagacacacctagaatgtgcccgtctgcagccaagaagaaaggcctcaccagaaaccaacccctactggcaccttaatcttggacttccagtctccagaactgatgcagtagaaatgaggccatgtgactctccacgctggaggaggacaggcactgaggcttccgccagctcgctcttgcttgtgtgatgcctgcccttggaacccagccaccgtaccgtgaggaagccaagcagccacgtggaaaggccattacaggtgttccagccacagttctcatggaggtcccagctaatagctggcatcagctgccagacatcacacggtgagggagactgcacaagattctagcctccgcccctggatgctccaactttgaaccagcccacctcacttgagtgccgcagagagaattgagtattattgctgaactctgcccaaagtgcagtttgtatgcaaaatacttcttcccttattttaaagtgataactttttggagagacttttttacacaacaagtagataatggaacaaatactacttatgatttttgcagagtaaatcggcttctcgcttttcc

SEQ ID NO: 1052 - DNA, 268 bp, Homo sapiens
gagattttcaaacctcagtatgactgaaaatatacttcagaaagtcaagacctgggcctaggagtctgcattaaaaacactactctgggtagagataaagaaagggactctctgagatgagggaaaagcagtggtttctaatctgtggtccagagatctctgtcgggatgaagaatatggagggagaaacaagagttattgtaaagggtctacaaagctctacgtatgcaaagcactatctatagactgaataaataagtcttgcact

SEQ ID NO: 1053 - DNA, 60 bp, Homo sapiens
atatttcgctctgaagaaacatcattagaaataaataaataaaattaacatataatacct

SEQ ID NO: 1054 - DNA, 419 bp, Homo sapiens
  misc_feature 290, 312, 319, 384, 389: n = A,T,C or G
tctcaataccttcacagaggtgaagaagcagcaaccaaatgaattagacagcaacatgattcctagagaatggcaagaccaattcttcaactacttcttcagcatttctgaaacatatggaagatggcccattgtgctctcttaattctttgataatctggacattgacttttccattatatgacctgggcttgtgggcatcatgtcataatgcacctgttcagacatctccctgtaccaatatggatcacttgaagagactcctttgcctccatcaaaaaggatacagntgtgtatctcttccatttttgnttacagngcctaaaattatttgagcaggttttcacctcttctctgaataaacaccttattagtccttaaaangaaangaaaaagggaaaataaaacttttaaatgca

SEQ ID NO: 1055 - DNA, 450 bp, Homo sapiens
  misc_feature 3: n = A,T,C or G
ggncgaggcagaaccaaaccatggatacgggtcctttgctcaaattcttctcaatgaagactctgtgatgaagaggccacttccatttaaaggcagcgacacttagaaaatcacaggcattaaaacttagaagaggtcaccttatccaacgtcccagccagcacagccatcctttcacagcatccatgacattcagcctcctctcagacatgggaagatcacctcttcatgaaacagcagattcttcaaggataaggaaatggaggaacaaagcagtgaagtaatctgtccaaagcccaaaagttgaattgttgaaactgacatctgaaagcaagtagcctggcttcagagtatatgcttttaatcgctgtgttatatactgcctctttatatgtgataatatagtatatttattaagttattaaaagaaacataagtttctttgttgtc

SEQ ID NO: 1056 - DNA, 172 bp, Homo sapiens
ggactaaggaccactaacaacagatccaagaacacatgtaatgcaaaccaggtattcatatgcctctgacattttcaagcctaaagatcaagagccatcatcttttacaagagttgcagtttggtcttaacctccaaaaaagaaacttctaataaatactatttccttctgt

SEQ ID NO: 1057 - DNA, 211 bp, Homo sapiens
agagtttgttgctaaacatttaccagcacaccctaaagagaggagaaaaaaatatgtgaagaaaaagaaaaaaggagaaatcaaagaaagagaaagcaaaaagagcatatttggatgtggaagaagaaaaagacaagttgaactgtcttaaattccagcccatgaaagccttcctttttttaaataaagtttttgttttgttttggtctgg

SEQ ID NO: 1058 - DNA, 328 bp, Homo sapiens
  misc_feature 12, 19, 26, 52: n = A,T,C or G
taccatggtgtnttgaatncagcttngctttcaccaaaacccgatcatgctnggcaccctaatttcaaatttccagcctccagaactgctccaagaaatggaattttattaaaagatggaagaggaggatatttgagagaaggggaactacctaatactgaaaactaatacagtccaggatacatagaagatgatcaataacacttattcaatctaaattaccctatcagcaagtggagagttctctctcgggagtgctgttttctttcctgccagtcagctctgtcaggttgaatagaaagcgataaataaagaggaaaagaattcc

SEQ ID NO: 1059 - DNA, 208 bp, Homo sapiens
gagttggttgttaaaaagagcctggaatctccccgtctctctctggcttcctctctcactcatgtgatatctgcacttggaggctcctcttctctttctgccatgaatgaaagcagcttgagaccctcaccagatacagatgctggtgccatgctctctgtacagcctgtagaccatgagccaaataaacctgttttcttcacaaatt

SEQ ID NO: 1060 - DNA, 334 bp, Homo sapiens
  misc_feature 24, 262: n = A,T,C or G
catatctcaaaaatcaagatgaanccttaagctttctacccagatgttgtgggaacttgaagacaaagtctcaaagagactccgttttggtcaacaattagcccttccacatttggatcctgggccacatgtggaaataaagagttccagaagaattctcccatgaaggcattggaatgcttcaatacatagttttgtgccaaatctacaataatcttcccaaaagaaagactcttcagtgttctggatttttcgggacttntcttattttcttgtgcaacatcttaacacaaactagaataaagatgacatataatcatctgcattcatgaat

SEQ ID NO: 1061 - DNA, 177 bp, Homo sapiens
aaagctggtcgttaaacatttactaaaacaccactggatacaagtgacatcatacaagatccagtccctgcaaccactgatctgcctcctccctctatggcgtcacctgtttggaacatttcatgtaaatggaaccatacaagatgtgaccttttgtgactggcttctctcacttgg

SEQ ID NO: 1062 - DNA, 381 bp, Homo sapiens
  misc_feature 368: n = A,T,C or G
ctgcaatgttcctagagagaagccagcactcgccagatctttggccaccccgaggtgtcgtgtgcataagggaagatgagaggctggttgacgcccacccttcaccagttttgtaaataacaagctggcgccccagaacccatccacagcagctttttcagtggcattatgcattcgtggtgcaagcatccttactgtgcttcaatcagtggcttcagtcgtggccggcgcacactgatggagtttcttcctcgtcgcgggtcatattttcctctttgcatgtctgatgacttttgattagatgcaggcgttgttcactttccctgttgagttctgagtatatttgcattcctattaaatatccctgngttttgctctggg

SEQ ID NO: 1063 - DNA, 141 bp, Homo sapiens
gaaataagggaccctggcatggatggagcatgtgaaactatcaagaacagtgaaatgtttcagatttttgctatttgccagtttcgtttcatgaatgctggcagaagacgcctgaatcaaagataaaggctgtttttactc

SEQ ID NO: 1064 - DNA, 581 bp, Homo sapiens
  misc_feature 492, 558: n = A,T,C or G
atgtgcagcctgtcaccaacaccaggaagctcagagacgtgccacctggaaaggaaatcagacaggagagctcagggtcgaagtcggcccggccgcctggagctccaaggggacaaatggagcccaggttcaaccgcagccagggaggcaacgtctgtgcacctgcaacttcccatggcattgcccaactcaatggctcaagaacctgccctgtcctgcttcgggcccagcattccatcctctgaaagaacacgagcgtccccacatgctccgtagggaccatcctgcctctgccctccccacttcaccagaagaactcctcctcatccttctgggccaacttggcagcaactcctccgggaagccttccttgctctcccaagacacggacaggcacccctcgtacgtgccaatagcattcccatcagcagttgtcacacacacaaggctcatgacctccctccccacctgtgcccccaggggaggggcttncttgggggcagggccatttcgtcgtcatcttccagcaccacacacactcggtttgctgaatgcttnctaaataaattcctgccaaatgc

SEQ ID NO: 1065 - DNA, 244 bp, Homo sapiens
atgtcatgttggagcattgcagactgctcttctcccttctgcctttacatacaagatgcctgttgctgagaacacttgttcccacttctctagcaggcaaggatctgggcaggacaacaaccacaggcatgtgctttctcatcatgtgatgtcatctgccaggtcatgatgcagcaagaaggccctcaccagatgccacccctccagaaccatgagccaaataaatgtctgttctttataaatg

SEQ ID NO: 1066 - DNA, 362 bp, Homo sapiens
gaaactctcgaagggtcctgcctcagggttgttttatccactagctgctctagacacagtgcctgtggccttccagctattcagtcaacagcatatgaaaatgcagttcattaaaagtaaaccatccaagtcacctgttcactgtggcttcctgtcaggagggacagtttagatgacttcttggagcctgtcaactcgtactgcactgatggtatcagatgcaagctggggaatttggaatgctatctgcaatagtgacatctggtggcttctaagttctactgcacctccttaaggcaggaaagcaagcctggcttttaagcagtatttgtgaaaaaataaaggaattacatgagttctgg

SEQ ID NO: 1067 - DNA, 418 bp, Homo sapiens
  misc_feature 21, 45, 182, 372, 375, 383: n = A,T,C or G
ggtctatgctacaccaccttntgcttacaccgaaacaaaagcggntggagggagctgagcccagagagggatgatgcaggctcttccagaacctgtgtcctatgcctcaagccttctttccctcctgctcgctgacaactgctgaagcagaaactaagattacgacactaggtggcagcatnatcccacgggaagacaacttgagtttggggagaccaccccccgccaaactcaacacaatttggagaggctccacgaaaaagaccagcccccaaataacagggagactctgcaatgcttggtttccagtgatgatcaacactttaagggccaatggaattcacccttacaggggaaaggggaccgttgaantancctggggnggggaggggcatgctcgagaaaccctacctaatgc

SEQ ID NO: 1068 - DNA, 322 bp, Homo sapiens
catggagcctagtacaaagaaaatatccaatgaactgaatctctactcttctctgaaaactcaaaagatgagtaaaggaaagtctgctattttcagagtccacttgtcctgagctggttttcttctaaaccacatcacaaaagagcacgatgctgtgaacctctcctttggactcaagtgtactaatggggaggaatggcaagttacatgcattatttctggattctataaaaatgaaagtgatgggaattaaaaataagttcattaatattgtaatttatagttctgaagagctttagcaaataaactaaacattccaaat

SEQ ID NO: 1069 - DNA, 317 bp, Homo sapiens
ggtgctttacgtcccacccaaggcaagaggaacgccagcgaggaagacaaagaggcccggggtggggcgcatgcccgccactggactgaaagctgagtcacaggaatcgtacccctgcagcgggccaggccctccagggagggacaccgcgcccttgtgtggagatgtccacagtagacaaaggcagtttcgaaataaaagaatgcctgtcaccccaggtgccaccccgacccttagttattatgcactggtccccaagagcaatttctgcgctgctgttgcaaaaattcatcgtaatgaaataaacgtaaaagggg

SEQ ID NO: 1070 - DNA, 678 bp, Homo sapiens
  misc_feature 24, 27, 29, 31, 32, 35, 36, 43, 51, 58, 482, 488, 530, 549,632, 664: n = A,T,C or G
gactctggggagctcctgcattanatnananntgnngatatcnactctaanagacatnaaggaggcacaaaagtcccatgccgagagagaagtcggtaactacgcctgtgaccgggagaggccggacttgctctccttcgcctaggtttgcactcagagcaagagagaatataggagagaggaagagagaaaggtaccgtcctgacaggtactttcctggctatcacagaaagaacaagcctttcatggtttattgggaaccaagctcaggtgtccctggaggcagagctacgtggacccagcaggcagaagagaaaagagccctgaacgggaagtgtgagacctgtgttctattttgagctttgccccaactgttaagaggactgaccatttaacaagggggagctggtgagatgactggacactttgaagtgacaccgggacccaagggttctcaagttcattatttgtgaagaaatggngcttgnttctgtgatctttctctgctctgaaatactacaggccttaanctagatgccctttggaggnctttcctggatcaacagatggaggacttttcaaaagcagacgaaagtgaatgggatcactcacacctctgcttcggacacagngaagcccagatggagaagaaagaaaacttggncaaagctatacttg

SEQ ID NO: 1071 - DNA, 257 bp, Homo sapiens
gacacaaatccaggagccattccttctgcctgggaggagggagtgatgaagaccagaggaatcccagaggagaagccatctgagatcgggaggaggagaaatggaacatcaggcggaggaaacagcccagacaatcgcactgggacgtgaaaacccttgggctgcatgcggggagaaaaccagaattggggatggttagggttttggagggaaacacagggacatgtgaccaaaaataataataactactgttactt

SEQ ID NO: 1072 - DNA, 491 bp, Homo sapiens
  misc_feature 384, 385, 450: n = A,T,C or G
gtaacctaatgggtttctcagccaagccgcaagcatgtaactgcaacttgaaggaggaagatgtctttagagacttagaaaagaccagcaagcttctttacaaaatggtctcttcaatcctggcatccacttgggaccaatgagatgggatgttcatcctcatagattttcacatatgtatctttaatggtatccccaggagcctctgaagtgcatcaggactttatttcaatgaagttcacactaagccaaaacaaggtatgccctattcaatttcttgtgtcccattacactcagctttgctgtccaactgatcacactagctgaagtcaaaaatgtgcaccagaaaataaaatgaggcctacttatcagattggcaaaaannaaaccaggtcataaaaccccttttggtaaatatatggaaaaaacacatctttttatatgcattgncatatatacatacatatatatgctgcattaatatatatact

SEQ ID NO: 1073 - DNA, 196 bp, Homo sapiens
ctaccagtctgaccctgactcaggcctccggaagaaaccactcgctaatcacagtctgtcttgcacccagacacggcatctcagacactgcacaaattaagaagtcaccctcaaaacctctatacagtgcaggaatacagctaagacaccacacccgagtactaacatctgcaaattctgaaaagctcctcataat

SEQ ID NO: 1074 - DNA, 511 bp, Homo sapiens
  misc_feature 392, 401, 404, 405, 423, 428, 439, 442, 446, 455, 473, 491: n = A,T,C or G
aaaaacagagatctgtgttctgaatggaaaaattcctactgatgccacccactagtctggaacaagtcagtctcaaacataacaacagacactggggagctctccaacaaaagatcacctcccaaagaacaggatggtgtcgaagactgaatgccagcctgaggaaacagaaatactacagaagcacgccagagcctgcagtgtctcctcgctgcctctcaatgaactgctaaaagaccaagaactctgctgagagataagaagaggggagggtgtgctgcaggtggtgctgggaggcccagaccttctcctgacatctggggctggctacaggaaacagaaacatcacccaggccttggcgccgagacaggacagaagcagattgtgactnaaatcttcnggnnggaaaggggggcctttcnttttntccttaggggntanaacnaaagcccanaagggttcatccaaaggnaacccttaaggcagtttnatgatccctttcaacctttt

SEQ ID NO: 1075 - DNA, 499 bp, Homo sapiens
  misc_feature 385, 388, 399, 404, 408, 419, 425, 429, 449, 459, 463, 469,471: n = A,T,C or G
gactttgcgtgtgaccactgcacctccaggaaggccaggtgcacatcgcttcccatgcgcccggcctcatggcctttgggggttgtcgtgtggaatggagatgacacgagtgctgcatgtgaggtcagtcaggatctttgattttggagcacaagccttctgcgtgctactgactgggtcctggcctccctccttccatggcatcgtcgtgaatgggaatttccaccactgcctccattagcttgaaaaaagttctccacagaagtaatgaccctggacttgcagaagagagcgctaaagctcagaaagtaaagtcagctctcaagaagacttcgctagtaattagcgaagtaggatcccacccagatctgcgttctccacctgntgncacatgaagcnggggnggtnaaaacagaccngggaantggntacctcattacaatgccccnctgactggtntaanttcccnanaggggttattggccattttgttcaatga

SEQ ID NO: 1076 - DNA, 427 bp, Homo sapiens
  misc_feature 372, 396, 410: n = A,T,C or G
gaaaaaagtatcagaatgctttctacatgaacaggaagactaaccaacgttgaatggcagccagtcttatctccgtccttatcaccaccttaccatgtcatcctggcgaagatgccatcacaggagtcagggttgaagtccaggtttaaggtgcatctagatgggttcccaggacgcctgaagtagcctcaagaggcccaaaagaaaaagctcctctggcacagtctcctaatggtgacaaaggagtccctctcatctgcttggcagccttacaatcagagcgttcttacatctaacctaattatttcccactgaaattcaaacctaattcatttattttttattctctataaaaatgaaaaacatcactgnggcaagtaacttgctcaatttctnacaaaaaaataaanaaaaggtggttggattc

SEQ ID NO: 1077 - DNA, 286 bp, Homo sapiens
  misc_feature 71: n = A,T,C or G
gtggggtctttcaatggaaagatgctcagttgagtggggaagagagcaggaatcagagtgtcaccatgcancttatgcaaaatagttgtcaagctggaaggatgcaagcccaatctttgccaccacaaaggaagataataaaacccatacgggagaaaacagagccacagatggagacagtcacattcctggtgacagtgtttgagcacctggatccagcccaacctgaggccattttctcctaggctttttagatctgtgaaccaataaatccccgctttaggag

SEQ ID NO: 1078 - DNA, 279 bp, Homo sapiens
cttcatctctccccgttacagaccaggaattccaaattcctagcccaaggtcagagaggtctcactgatgcctgtgtagccacgtgaggatgggaagtctcatttgccagtaagcactacaggaagtgatggttgaacacgatgggactaataagaaggaaacgtagttagagtgatcttattcatttaaaaacaaaagcagcaacaatacagcagtcgaggaaaagaatcaattctatttaagcaaagcaatttaaagtaataaaaaatgtttccagc

SEQ ID NO: 1079 - DNA, 481 bp, Homo sapiens
  misc_feature 352, 392, 397, 409, 416, 419, 426, 438, 467: n = A,T,C or G
ctgctggttggtttgaagagaagtttagtgctctcaacagcaatgaacagcattgggtcaatattcagtggccgggagacaatctgggttactacgtatgctgctttgttgtgaactggaattggcatcatgtctccaacattctgaagccaaggctgaggatatacaaggtctggaatcattaagggtgtgataaagtgctgagaaacacaggagaatgcattgttcagtgaatgaaaattgaaaagagagatggagacagacaaagaaaaagactgaacaactgaatagccaattttttttaactctcaggatgttttctcctacctggatggacacaattttctgtggnggtacatgataagtattggctggggtgaccattccatttnctggnccgcccaagganattttgnaangtaacanaaaagggccatnatattttccttctctaacctgccttggancaagccctaaaatg

SEQ ID NO: 1080 - DNA, 200 bp, Homo sapiens
agagctcacagcatcctgtctcctccagaagctcttccccagctgaaatggaagtgaaagactggtagtctcctcctcaaccacccacctcctggggccctgactgtgtggatgaactcctcacacccaggatttgtgtctccagtgaaaagcagcaatttatcctacactgaaaatttcctgaataaaaacagttcacg

SEQ ID NO: 1081 - DNA, 239 bp, Homo sapiens
caggagcatgcaacacctcttggactcgatgaaagctgtcgccacaggtttcaaccagtcagtactctgaaagagcatcttgggggaaaaaaaagcgtgtcagacattcatcttcataaccagaaagtgaagtctcgcaaaggaaaaagacaagactaaagggaataaaccatcgttgtgtgggctttttcttccactcagcatctcttcccttattaaaatgagagggataacttaag

SEQ ID NO: 1082 - DNA, 495 bp, Homo sapiens
  misc_feature 390, 417, 435, 461, 474, 479: n = A,T,C or G
cccttcccgtcctcccgctccccagcaagtcagaagcagaaggcttggttgctgccagccaggcaagggacagcctccagcagagtccacccacccacagttgtctccttaggacaaacagaaagtttcacaagcacactttgttcagttctgcagcttaccaggaacactagaaagcactccagcactgtgcctgggggccatttgaaacagcaaaatcatcaacaaaaaccacaaaaatgcaaaaaccatggcactaaatagaccatgaaaaggacacctgtttactgcatgacctgaaacaagaaggcggagcgttgccttgttcgacttcagctgggaagataggcgtcaggggactcaaacttttcagcactctgttatatctgngaatgatcacaaaaaaactggggagtnttatttttgggggttacnaataaatttttaccaagtaagcttgnttcacaaatacanaattntggggataatgaaaat

SEQ ID NO: 1083 - DNA, 98 bp, Homo sapiens
  misc_feature 7: n = A,T,C or G
gtaacangaatgaagaaactacaaagaatattgagaaggaagcatcacagaagtgagaggaaaaccaggaaaagatggctcatggaagcaaagaaaac

SEQ ID NO: 1084 - DNA, 486 bp, Homo sapiens
  misc_feature 395, 397, 403, 420, 432, 438: n = A,T,C or G
cgtccacaggatgtcgggccaggagagctgaaagccaatactgatgaggaagggccaagtgaggaagagtctgagctgcatatgtcaagaaggagaaaggggaaagaagcaaggagcgagaccagagggagccacgcagaaacctctggcctctctgcacgtctgtcttatcctacagagtggcgactctaaaaggccaagggtgccagcgcccagcgacagttcacagcctgagacacgctttgctcacacgcctccctcctcctctggctcctacctgataaaaagcattaccggttttgatgtttccaacctcccccattttccctggtgaaagatccattcatttcagtgctaacaagacatcataagcagggagaaggaacaaaaggcanantgtgtncttaaggagggaggcantttgcaaaagcnccactnttttcaccttgtccacagaataaagggttgaagactaaaaaaaaaatt

SEQ ID NO: 1085 - DNA, 280 bp, Homo sapiens
  misc_feature 45, 52, 64, 67, 96, 99, 101, 104, 143, 146, 155, 161, 162,171, 184, 187, 189, 201, 209, 221: n = A,T,C or G
ggtctgcacctggagactcccacctaagatgggggtttagatganaccactntgggaggacacncantcgagtgtggaggccccgaggaagatcanctntnaanacacaggcaggcaaagggcagacctctaaggagatggangangaatgacanagggcnngaagaatcntgtgagggactgncananaagccagtgacnaaaacttncagaagagctgncaacagtaccaaacaaagcagaagagtctcaaaagattaaaaataaaatttgcttccat

SEQ ID NO: 1086 - DNA, 408 bp, Homo sapiens
atgaggagacccaagttcccagaagagcagttgcacactcgaggctggaggacatgggcagaaccagagctccttgcctccctcccagccccccacccaagtaacacgttcctgatcctgtcctggaagcagcttcgaggaaatgcccagacccctggggggtgatgtggtggcaaggtgacaaaggggcaggtcacaacgctgtcacaagctgatatgcaagaactcacaggcatgacccccaggggctatgggtgtaagggcatctgctctgccctttccagcgggcctagttttggtggcctctgttccatttatttgcttaggaacacaaagctgaatgcactgtttgcaggaagttgtgtgtctaagtcacctaagttagtaaaataaataaaaaccttttgg

SEQ ID NO: 1087 - DNA, 477 bp, Homo sapiens
  misc_feature 399, 435, 444, 447: n = A,T,C or G
acatgctgctcccaaacagtgcctttgaatcaagacccagtcatcgtattcgaagaaaaaggaaatatccctgaccatgttgggacttaacactgcttcacagagctacccaaaccaaggagaataccaacgtgaattgtctttccacctgttgtgtggggccagcaattattcttttagcttgacgcgttaacccacctgctccctgtggccctgggatgctctgccatcccccgtggctgccagttcacttagggtagacttatggcagagggatgtcaattttgcttgaactgctcaatcactgctgacatttcgttaaccaccctatgaacttctcaagcctgaagtagcagcaacttgtgcccttgaaaactgaacagaaaacaactggattgnattttttctttcaccaggaaaaaagacaattttttntttgttganaangtcataaaggcattttacccacttattttt

SEQ ID NO: 1088 - DNA, 500 bp, Homo sapiens
  misc_feature 385, 398, 402, 415, 429, 432, 444, 454: n = A,T,C or G
cttctcttattcctgactctggctgccatcgttggctgatgaaagagttccttttatttggtgagttcatccatcaagattgtcttcgaagctttgtctttgaagttttcacctattcccaaccactccccctggaagcttgtttcctgcactgttaagagcatggaccctgaaggcggactacctggattcaaaccctacctccacctcttattgggagaatgaccttgtgtaaatgacatcacttctgtgtctcagttaacacgcctgtaaaatggaaataatatctatttgtgatggttaagttttatgtgccaacttgactgagtcagagaataccgagacagcaggtaaaacattatttctgagtgtctatgaagggtgnatctggaaaaaantacntttggaatccgtngaaaaggggcaagnaanatctggggcggntcatctgggnatcatccaatccactggagggctcacccaaatagaacaaaaaggct

SEQ ID NO: 1089 - DNA, 381 bp, Homo sapiens
  misc_feature 160, 183, 239, 243, 278, 299, 310, 324, 328, 333, 337, 350,365, 367: n = A,T,C or G
gacactggagaggggtaagcatgctaagaagtgagatggatttaaccagcaactcacggcaaagtgcgtatagctgcgtttgagaaggcttagtcatgactagaaaagtgtgaatactgtgacatatccttgcaaaaaaatgttcagcttaagcctctanactaacttctggtttacaagaanaaaaaagaggggcccatttccaaaaagactcctgccttgaactcttcaaaatgccnatgncacagggggaaaaaagatgggggaactctactacnttaaagctaaagaaaaatttnaaaaaaaaaangaaaaaaagggccngcgnggccnattnagcttggacttanccaggctgaacttgntnaaaaggggggggac

SEQ ID NO: 1090 - DNA, 458 bp, Homo sapiens
gtcacaacttccatagtcagatcctggaagcccacttcaagcacagcatattattaacaaataaccttcggagaagagagatgctctcggtgccagtgggggaagaaaggactatacttacacttatgtcgagactgcaaaggctaacagcatcttcatcttgggtgctctgtttccgctttcgctgcaaaacaaacgaaaaaacaaagttcaaaggcatgcagccctctccagtccaattcaacacactacccagctttggagccaagcctcatgagttcccccaacccagttcctgccagatactgccacctgctccaagtgtcaaatccagaagacaaatggcctccaatggtctttttaattcagccatagacagtcaatctgggatagaatgatctccttaaggaacccacatgttttataaaataaaaactgcatgaattatcaaaaaaaaa

SEQ ID NO: 1091 - DNA, 227 bp, Homo sapiens
  misc_feature 26, 29, 31, 45: n = A,T,C or G
gactctggggagctcctgcattaagntananctgatgactccagngacccttcatgagaagaacatgtctgcggtagccactggtccaaggagaatgaggaaatatgtagagcagctttgaacctaatcagcagtctgaagtcaagcccagtggattccagccaagcacagcagaaccacagccaatctatagaactatgagagaggaaataaatatttgtggctat

SEQ ID NO: 1092 - DNA, 256 bp, Homo sapiens
gcctctatttaccatccccaggttggaagcaaatgtcagagagaccagaggaaaccgtgtgtgttttagtgggtttatttggaggggcatgggctggaaaggagcgggcagagatgcagggcaaatctataaaacattttgaacttgtggcctataaaccaccaaacatcatgcaggtcactgatgtgaggatctgctgggcttatggcatttgtgacaaacccaatgattcttttattacaacagcttataaatg

SEQ ID NO: 1093 - DNA, 305 bp, Homo sapiens
gattgggaccagctcatctgaaaattgattgccggacatggagaacaaactggttcagtgttaacgaggaggaacggatttgtccatctgaccacaacccaaattgcttgaaaatttgggcagctgtgttaacagggaaagaagttgggacatggagttggacagacctggctttgagactctgcctcatcacgacctcgctgtgtgttccctctgaacttagctttctatattaacaaaatgaggccaataataattccaccctgtctgcattccagggcaattaaagaatcataaattggcct

SEQ ID NO: 1094 - DNA, 190 bp, Homo sapiens
  misc_feature 25: n = A,T,C or G
gtgaagaaatgagccataagagaangacttgcccaagatcacacagcatggcagagcccgggacatgaaactaagcattctggctccagagtccacgtttttaactcaaccggaatactcagcaatggctgagtctacgccctgtcgtcccctcctgggtctcacagaatggaaataaatgtctcaactc

SEQ ID NO: 1095 - DNA, 509 bp, Homo sapiens
  misc_feature 368, 378, 395, 412, 420, 428, 438, 468, 470, 472, 478, 495: n = A,T,C or G
ctttgagccttagctgtcattaccaggcaaaaggaagagccccactcagcacccgtttccggttttacggcccaggcactgttgagcagaccactatgtggaaagccagggaggataatagcagccccccaatgaggccacgagccccagaaccatcctgattgctccctctgaggtgatggacagaggaaattttccctccaaggactgacagagaaagaacaacggagatgtggtcgtctgctggcatccattaacttgtgcaactagcaaagcaccgagtccacagggaaaagggagagaaagtgtaaatgaaggtgcaattgtgtgtggaaggctgagtgtggtcacaggaaaattgcctcatncttgtattgnaatggcatcttttattncctcaaccccaaggttntaaagtangttccctnttccttttcntaagccaagcacccttatgccaccatcatntntnacttanaccacaactttatcctnctgacatgtttacc

SEQ ID NO: 1096 - DNA, 419 bp, Homo sapiens
ttgtgataataaaggctcagagaaatcaagttttaagccctaagtcctgcagtgaatgagcagcagagctgcagctcgtctcagtcctgtggatcacaccatggcctggaaggaaaagtttagggcaatataaccccctacaaacaaccttccgacaagaggacaagtgttttcacaaggcttcatggaatgtcgaagtggaggaacaaaacacttcagctggaaagatagcacatagccagaagtcaaccccaaccctaccaaaaataatgatgccaggaaacagagctacatacacaaaagggaatgtgtaccaggatacacataataaagtcccctggccaaagctgggattcctcctggccaagccagaggagtgattcaacttaagagaaaattggaaggaggacatgtggaat

SEQ ID NO: 1097 - DNA, 95 bp, Homo sapiens
gctggaaggatgacctcggaagtcacatgctgaagatggaagacatgttgtagtgctgcattgacctggggctcagacatctcagactcttgtag

SEQ ID NO: 1098 - DNA, 505 bp, Homo sapiens
  misc_feature 392, 431, 447, 470: n = A,T,C or G
gacctaacaaagggaatggagagtaatcacatcattccaagacccttcctttgcagtcctgtagtcacagctccaaagactctgggttttggagtaagagctgtaactgctcaagaagaattcgtgaacaaaagcacatctctctgaggaggcaaaatatcacaggcctatgacaccagactgctggaagaggcactagaggttgacaatagattccaacatctcataaaccaggaagcagcctcaggaaggttggcagctgccaaacccacaggctaagcagtggtgggactgtgattcaaactcagatattttggttcatctgccaggaaatttttcctgtcctggaattatctgctcttctcaagaaggaaaaacttaatccttcttantcctgaaacccatcttaggaaaggcaagaaggaaatgcnccaaaatgttaactgnggttgacactgaagggggaattngggctttgtctattttttctgcattgacccatttg

SEQ ID NO: 1099 - DNA, 500 bp, Homo sapiens
  misc_feature 334, 373, 399, 426: n = A,T,C or G
gagaaaaaacatatgaacctgagcactgaatgacttatcaagaagatatttgaaactacctaaacaaggaagtttgtgttccaaggtaagagaacctgaaatgaaaaactcaggatccctcacgaacagcctgaccctgctttcaaccaggaagttcaagggaggcaggactttacggtcaaaactgcaaagccgaagctcaagactgtaagaagaaagtgatcttcaaagaaaaggattcacccaaatcgaagaggatatcgtttcgcatcagggacactcgtctccacacctcctacctcaaagtcctacgcacctacccttcacgtctctncaaagcaactgaattaaagcgcctactgggcttggcggngcaaggaatttaattcaggaactatnggggaaaaaagcaggggaggaagaaanaggaaagacccgggctgaggcaccaggaagaagggacgcacaagaacctatcattggagcttgttcgaggccag

SEQ ID NO: 1100 - DNA, 482 bp, Homo sapiens
  misc_feature 358, 410, 418, 454, 469: n = A,T,C or G
cttcctgcaactgaaggtcattcctctttgttagaagactaagggtccctgacctgatctgtggagcaccagggtggagagagtggaataagcagcaaaacgaaaaattggatgctgttttcaaaagttttgttctcattcttggattatagattatctaaagggaaaatttaactcaaccaaaaaattcgttcagctccatgaagctaaagatgctataaactgactctttcctaaagagcaccaaacctgaaatttttcctgctagagaggaactaatcttcaaggacacctgtctattgctagacattaagaaggaaggtgaactccgttctgtcttcataaaacacatttttgncttttccccttacttcttcactgaaccccttttgtttacaaagtccaagctntgactggnggaggggggaaaatctgaaactgtcagccccaaggnggaacaaaatgaaanggagaaaaaaaat

SEQ ID NO: 1101 - DNA, 508 bp, Homo sapiens
  misc_feature 413, 415: n = A,T,C or G
cctcatgtcactagaagctacagtattggacagcacaagctgcagagtgtctgttctttgaggattctctgttctccaaatgtaaaatcaagaatgagaacgctggcagaagtaaggaaagatgagacctgttttgaaaacgaagttttagaggaactatgtgaacagattgtgttcttcaggggcctggcacatgatgacatctaacacccacggccaacagcattcataatcaccaatacgcagcatcatactctgtctactggcaattcccagagatccaagaaatatgtaaaacactggctagaaagtgttcttgtggcacgaggcggtgctcatcaagtggctttagggtgcactggtcacctgttacattccaggcttctggaggacctgagtccttgccccacttnancccacaccaccttttgtcacccttgagacttataaccaggccaggcgcgatggctcatgcctataatctcagcacgatgggaggccgaggcaa

SEQ ID NO: 1102 - DNA, 376 bp, Homo sapiens
  misc_feature 300: n = A,T,C or G
caaatgtactctatcgtcttccacactgggaccccagacactcatggaggaggaaattcttgaccaaaaatatgtgttacagaacctgagagagaagaaaaatttcaggaagacgatgacagtcaataagatgaaatgatgaagtaaatgtaaacatgatacagactgaggccattggctctgaatatcgagacatcactggaatgttttgagaaattaactttgattgcgaagagattaagaattagaatgcagtaggaaaatgaattaacatctgataagaaaagaaaccaaagagtnaagacctgtagttctgcaacacagatgctcatcagaaaaatgtgggtaaccttttcaataataaaaccctggaccc

SEQ ID NO: 1103 - DNA, 304 bp, Homo sapiens
  misc_feature 14, 178, 228, 233, 263: n = A,T,C or G
atgtctgatgtccnagtaggagtgattatggttactgtgtgaagacttgactctcaaggagttgcaggatcatacgtgggaagtggaggggttcccatgtgaccttctatgaagatcagaagaatagaaaacctgaagaatacattttggttggaagaatagaaagtctgcctagagngtctttggaatgccagaggatgagatccgtcttgtttactaagagttgtnacggntcccctcaccttacctcccaaatcctggtnaggaaccaggacctgccaaggtgaagcactgatacattttg

SEQ ID NO: 1104 - DNA, 501 bp, Homo sapiens
  misc_feature 18, 44, 134, 140, 144, 226, 247, 282, 326, 367, 371, 383,386, 409, 414, 415, 433, 450, 452, 456, 485, 487: n = A,T,C or G
gaatcccatgtgcatgangcccctacctccctggaccacaccancatgagatgtcttcctgtggcaatgagggtcacgagtcttgcctgattttctatggttccagaatcacccaagcggataatgaagtgagntgcagntaanatggagcccactggggaagagatgaagcagtgttcacctgaagcaccatctgcattttcctagtcctgacagttacctctanctgaccagggtttctgtgcangacttctggtatcaaatcaacgatcaagggtggtnacacataaagatgaacagttccatacgcaggtttaaaaaagaangcctatgaagaaatggtaatacttaaaagcactcttgaagntaangggatatggcgntangaaaacctttaagatccttttantaggnnagaaaatggtctcctcantaaaaacaaggccgtangntttntttgggctttcgccaaatgcaacctgccntnccggccggtgccaa

SEQ ID NO: 1105 - DNA, 431 bp, Homo sapiens
  misc_feature 7, 10, 29, 31, 42, 43, 44, 45, 57, 58, 62, 65, 67, 77, 122,238, 239, 320: n = A,T,C or G
caaaacngangacccagccttgtgtgcanangccgctgaacnnnngaaagcccgaanngaancananaggggctcangacgctgtgagacttttccatttcctttgcctcccagcaggccgngaaagagtcacttttccttgaggaagaaagaaggctctgtgtgcagggcaagggtacagtccttctaaccaaaagatgtgtgtgctgcatgggatgtggccaccgacattcatttnncttttactgggacttaacgaattccatctctcagtagccatatgccagggtcccaccctgtttcctctggctctggagggnggagaggaaggacttgctttacccaagggtctataaggaatcttgggaaagacactgccccttaaatcactttttgggcactggtgtcacctttgtgtcacttgtgtccct

SEQ ID NO: 1106 - DNA, 414 bp, Homo sapiens
  misc_feature 20, 21, 23, 24, 26, 27, 30, 87, 89, 337: n = A,T,C or G
gacccagcttgtgtgcacanncnncnngangacaattgcatcactggcttctaccactttgacaacaggcagcaccaaaagcagggncnggaggactaaggacaactgtgttgaaactgagtcaacagctctgtttgagtaaatgatccatccttgaatcgtgtatgcagagacaagatcagcagttggattgttgttttaataaactggaagtctgccaacattatctgggaagaggacgaggacattaatgctagcatgcaatctagccgtgtttggatttaagacagaatttaatcttcttgcctcctttcctttccctcctccccttttcagnccttttttccttaatacacaagtctcttttatggagttaactcaagctatcttaaacagcatgaactaataaaggca

SEQ ID NO: 1107 - DNA, 435 bp, Homo sapiens
  misc_feature 24, 356, 420: n = A,T,C or G
tcatgcagacacctgatggaagangtcttccaggcagaaggaaggacaaatacccttgatatacatgtacttggccggcatgaggaagagcaatgtggaagcctactcaatgtgaagacaaggatgaagacctttatgatgatccatttccatttggtgaatgcctctttcaaaagaagacgtaagacatctggtgtcaagaagaataaatacaataccattaaagaattataaacagaaccagagccagagaagaataccatttttacttgacagatgactgacacaaaacttggttacacagacgaagtatttaagcaagatactttctcgaaaatgaacaacacgccgactgncatttcaaggaaaccaactgacaacatttcctgttaggacaaaatacaagttttcaaccaaatnttagaatttaggaca

SEQ ID NO: 1108 - DNA, 437 bp, Homo sapiens
  misc_feature 328, 400, 423: n = A,T,C or G
ggaattctaaaagtccaaactccatctttggacgccaaaccggactgagcagaagaatcttctggtatgtgaactagggtcctggttctggttatcagctctcctccacctaaataagacctgattcccaggcaccacatgctgatgtggtcaggaatgagatggcacctacctctgcagcttggcagctcctcgaatggagacattgggtcttattcacctctgggtctttagcacccagcacaaaggtcagacagggtccagacgcagttgtgcccacttttcgaggctagaaaataatgatctaaggaaaagacgattttgaggncttcagaaagggaatacagcagcaaaagccagggagcctggttaacttctttgagcacttggaaggataaanaaatccataccctggaaaatggnggtttgcttaaatg

SEQ ID NO: 1109 - DNA, 383 bp, Homo sapiens
  misc_feature 22, 23, 33, 290, 319, 321, 330, 334, 335, 338, 341, 345,347, 349, 357, 360, 363, 364: n = A,T,C or G
ctggggagctcctgcattaagnnataacttganggaagacaaccaccatgtcctgaggccactcaggcagcctacgaagaggccacatagagaagaacagagggctgcagtctacagctagcaaggaaccacagcctgccaacaaccataagagcctgcgtgggaggggaccttccagcccccattgacagcctgagtgcaactccatgagagacgctgaggagaatcaagtagctaagcccttcctcaattcctgactctcacaaactgtgcaagataataaagattcnctcttttcagctgcaaaaaaaaaaagggncnggggggccntttnngtnggncttnancngggggaanttnttnnaaaggggggggcccccccc

SEQ ID NO: 1110 - DNA, 79 bp, Homo sapiens
gactttgcttctgggaagatggagtacttttccttattctttccacaaacgacaactaaaatccctaggcattatatat

SEQ ID NO: 1111 - DNA, 473 bp, Homo sapiens
  misc_feature 7, 84, 130, 135, 139, 150, 219, 229, 239, 243, 258, 261,284, 287, 290, 293, 295, 300, 315, 353, 364, 366, 371, 389,399, 402, 416, 423, 438, 453, 458: n = A,T,C or G
ttctgtnacctcaagcggcatccctgggccctggtctccaagtcccgatcctgtctgaaaaatggcgctgaaggcctagcacanggcagcctctacctcaaagcaccatcccgcttaacattccaacggngcctnaaangaaaaaccctntggtggggtccaccaaaaacccctggcctccatgtgctccttcctggccccaaggacagcttgacactntccaggaagnaaaggccaangggnaaccccctttgcaanaanacttatttcttaaaaaagatctnggnttntanantcaanggggacctgggtttnaaagtccccggcattttgcccttcttgaacttcaccanttgtttcaacncnttttngggccacttccacctttnccccttcatnctngggaaaccctccangtttttncctccattctggggnaagtccaaggggggnggggnggggaccccaccctt

SEQ ID NO: 1112 - DNA, 417 bp, Homo sapiens
  misc_feature 334: n = A,T,C or G
ttctgtcacctcaagcggcatccctgggccctggtctccaagtcccgatcctgtctgaaaaatggcctgaaggcctagcacagggcagcctctacctcaaagcaccatccggcttaacatcccagcggtgcctcagatgagaagccctgtggtggggtccaccagaaacccctggcctccatgtctccttcctggccccaaggacagctgacactgtccaggaggaaagggcaaaggggaagcacgtggcaagacactcatttctcagaaagtctgggttaggagtcaggggacctgggttcaagtcccgcatctgcctctgactcacaagtgncacctttgggcacttactttcccttcgctggacctcagtttcctcatctgggagtcaaggggggtggaccagctgatctccgg

SEQ ID NO: 1113 - DNA, 262 bp, Homo sapiens
agatggggttccatcatgatgcccagactggtcttgaactcctgagctcaagctatccacccaccttggctgaaatggcctgacatgatcagcactgggcgtgacccaaagatggaatgaagaacatgaatggatgactgtttccttagcaacaagaaccatatgtttcctttgaaacaagaaaccaaaagaaaagttcccatccatttttctttccaccaattcaaagactaaatagtagtggcttaaaattataatgttt

SEQ ID NO: 1114 - DNA, 229 bp, Homo sapiens
gctcaaccaaatgcctctgccaggagaatctttcagagtgtcctggaacattggaaataggcttaaagcttaaatgatgaatcagaagagttatgctgtattctaatgctgccactagggccacacagggtgccaacatccaatctcaagatcttcgggaaatatgctcaccctccaaaatacttacagatgtgtctcctcttttttgtaaaataaatgctcttcttat

SEQ ID NO: 1115 - DNA, 318 bp, Homo sapiens
gtgctgcaatcaagagaaagagacagagccacactgacaagaccacgttctagagagaaggaaatatgagaggctcaagggcagggctgtgaggacaagcaggggagatgagatgaggagctggctgcatccaaactgcaatgaacctataccatagaacacagaacacaaacattgaacctgctgagcctgtatgaagctactatcccaggactgtgaaaagtagactagttgaggaagaattcaagtcgacactgaactagtggtagagctctcatcatacagatcgttggaaagtagcatcccgacagttctgag

SEQ ID NO: 1116 - DNA, 426 bp, Homo sapiens
  misc_feature 10, 25, 65, 67, 88, 96, 105, 111, 143, 381: n = A,T,C or G
atgcacaganaatttctgaccttgngacgtttgggagtgaggagatcccatacagaggcatccangnatttccagagatcctgtggcnggtgaggnctgccctcnctgganccaactcgtctataatatcttcctaacagcangagtcgcctgcggggaggagaggagaagacagactaagctgcgcgtagagcggcatcaggagcaagttaccgttagcatgtgtaaacaaaacaactcgactcctctgtgtcagaatcaacaacatcaaagctgataatgtggctggttgggatcaattagcactggattttgccccaagattgcttcccaaggcggacaagtgggagccacttcattttccagcgacttttacttcgntcacgggcatatccacgccagggctgcagaagcatttcaaaaggg

SEQ ID NO: 1117 - DNA, 229 bp, Homo sapiens
tgacacacggagaggaaacatcagattgctttttatccgcatctataagcccgggtcataactggagaaaaagccaccatcaacccagaaggccaacttccataattatatgaatcgtttgtgaacatttatggattaaaatgtttgagtaaagctgaaatcggatattacagtccatgaatagttcatgccatgagacaaaaaattaaagaaaaaaatttcattgatt

SEQ ID NO: 1118 - DNA, 430 bp, Homo sapiens
  misc_feature 396, 414: n = A,T,C or G
catgaactgaggtgttccatgggtggtcagccgatctccacccccaaggttgccttcccagagcctcagacccatgccccagcgttatggagatgtcttctggaagaaccttaatcaaaggcccacccccacttggctggaggagcagcacattccacccatgctgagagccactggttgctcccagcttggtctgtatcctcctgagcagctcccaccccctgaaatgctttggagaagaaagaagaggaggccatgtttggaaggaatgcagcagcagggccttgggggagtccccgcccgggtgagggctgtcacttaccacctggaggacctaaaaaaggcgtcagaagcattattaaacgaacttgaaaaaggcccagtggggcaagcttntggggctggcatcttganccagtgggtgcttggc

SEQ ID NO: 1119 - DNA, 435 bp, Homo sapiens
  misc_feature 2, 5, 8, 9, 17, 19, 21, 36, 39, 40, 53, 68, 73, 241, 250,285, 320, 326, 346, 368, 383, 403: n = A,T,C or G
cnaanctnnaaagggcncntnccaggttaaaacccncanncccaaaaaaaatngggttaaaaggctgnccttnggctccatcaacactctgctagccaacactttggccgcaagttcactctgctatccacagctctggggcacttctctggctgtctgttagtaaccactaacctaacccaacctcattggccaggtaaaagctatcgaaaataaactgaaaattgctatctctatatgnccatgaggnttaatacaggaaaagctgatagtcaaaagtcaagntcaaatggcatttggtctccacagtgaaaaaatgnctttangctggaataccaaagaactngggaggcaacacccggacctgncttcaaaagattttnatcttcccttttcccttggntggcagggcctaaaatcaattcccagggttca

SEQ ID NO: 1120 - DNA, 405 bp, Homo sapiens
  misc_feature 200: n = A,T,C or G
aaatggggaagattgaagcaaaaaatggaacacgttaaggctatttatgaagtaagaaatggttcccctgctactcttgtgaagtttccaggtaccaaaagcaaacttcctcctaacgactcagggttccaatcttttctcccttaaaaatacaagatccagaagaggagccctgtcagatttccattcaacaaaaccgntgggcttaccaaccttacactggaaacaacaagctcaaaagtggactctgaaacttgctttttaaaaaaagcgtttcaagcgataagtgtaacgtgctacagcaagtttagacatctgcaggtctgatgcagtcatcttctggggggtttacccaacagacacacacagggccaggcaccttttcttctttagcagcagaagaaa

SEQ ID NO: 1121 - DNA, 424 bp, Homo sapiens
  misc_feature 142, 184, 359, 391: n = A,T,C or G
gcgctgacccacgaatgcaactctcagccgagctgtccctgccggatttcaaacagctgaagaagggctgggagaacatcaaggcttgggctaaaacaattatggcccatgaaaggagagagaaggtgaaagggagcgtcanccccctcctgagtaaccaagtcctagggaaggagatcaccancatgctgctggagcagctctacttcctgcagagcactccttccacccctccccccggaggaggagcccaaataccacgccacggcccaagaatcatttgctgtttcaaatagagaactgggcgatgatgaaaaaagaagttcataccgtttttccaacaccgtgaaaaggacctnttaaaccctgaaccctcgtgttcaagcttgtnaagaataacagccaataaaaactacattgagcc

SEQ ID NO: 1122 - DNA, 422 bp, Homo sapiens
  misc_feature 1, 2, 3, 15, 23, 31, 33, 335, 337, 339, 358, 365: n = A,T,C or G
nnnaactgaaataangaaggatnggtcagananacagccaacggtgtggccaacaatcaccactccagagccctgccccatctagggcgcacgtgcatgcctctgaatttcctcccctttccttggtccaaccacagtccaggaaagcagattttctatgccccgtggcaatcacagtggaaaatggaagtacaatggagtgctgtacctacccaagcaccaggaggcaggagtcgagctactcacagactccctagaggagaactccacgcacccaaactctgctgtgccccctctgagttctgagcatgccaggtgaggcctctccctctctntntnccttcattccaagtttttnggaaaanaaagcaagcagcccgcgtgaccagacagagccttccttgctaataaacccatcctga

SEQ ID NO: 1123 - DNA, 409 bp, Homo sapiens
  misc_feature 6, 21, 24, 39, 53, 54, 56, 66, 68, 87, 95, 107: n = A,T,C or G
gcttantaggtattccattgngcntacagacctcatttnttactccattcatnngntgatggctgnancttggctcttgagaataangcaccaangaacatgggagngcagcaaagctcatgacattacaggaggagcagagttctatcatgtagaaggtcattcacccgagcatgcttccttatcatcatctcatcttgtgccggtatacaagtaagatcagccagctgctgaaatctctaaggaatatctctccatggagacagagccagacggcccaagtctcttctctgttcttgagttcctgttttcaagtaatgatttggataaactgggagaaccagtttcctttcctccaactctggcaagctgaaattaattctccaaagactcctctttggaggcaagc

SEQ ID NO: 1124 - DNA, 419 bp, Homo sapiens
  misc_feature 26, 28, 30, 32, 44, 49, 50, 56, 59, 67, 76, 91, 104, 107,363, 378: n = A,T,C or G
gcgctggggagctcctgctttaagtnanancngaaatcacccangtcannaagganaangaaaatanaagggcaanctcgctgtaaagaanggattactcaaangtngaaccaaagccgggggaaagaacatggaaagcagtggagaggcaccaggcaggtcgctttctctttctggtcctcaaccacagcactgccgtcttcagaacagtaactattacttgtccataccaggcatcttcaatactcctcaactcatatcaagaattctgcccagtctaaacagacctccatcctacaaacactgaaaccctaacccaaaaccttacatatatccacctctcacttatcccttctgagacantatgaaaaacaaagnggcagtttcccttactggaataagtattaaattttgcttgg

SEQ ID NO: 1125 - DNA, 410 bp, Homo sapiens
  misc_feature 343: n = A,T,C or G
gagccgcaaagacagcctggaaagtgacagctccacggccatcattccccatgagctgattcgcacgcggcagcttgagagcgtacatctgaaattcaaccaggagtccggagccctcattcctctctgcctaaggggcaggctcctgcatggacggcactttacatataaaagtatcacaggtgacatggccattaccgtttgtctccacgggagtggaaggcgcctttgccactgaggagcatccttacgcggctcatggaccctggttacaaattctgttgaccgaagagtttgtagagaaaatgttggaggatttagaaagatttgacttcttccagangaattcaaacttcccaaagagtacagctggcctgaaaagaagctgaaggtctccatcctgcctgacg

SEQ ID NO: 1126 - DNA, 358 bp, Homo sapiens
  misc_feature 2, 3, 5, 20: n = A,T,C or G
cnnanactgagagatagganctcgctacggttgcctggtctcaaactcctgggcccaagccatcttccagcatttgcctcccaaagttctgggattacagggcctgcacaccaatgaaactactgatatcagctgttctgaagaaacccagaagagactgaatcaccaaagagtgcagtttccacatcctgatgattttatcatccttactctgaccaaacagtgacctcaattttacagcccctcacaccctataatcatcctaaaaacttcagcccagaactcctcaggaggataatttgagggtttctcccatttccttatttggctgccctgtaatcattaaacactttctctg

SEQ ID NO: 1127 - DNA, 488 bp, Homo sapiens
  misc_feature 19, 20, 22, 23, 25, 28, 43, 45, 81, 137, 170, 330, 367, 415,475: n = A,T,C or G
gtctggggagctcctgcannanncntgnactgagagttggctnangagaagatcaagagtgccatctggaagctcagggcnatgagaacaacctgggccctggtctctcaagccaccatcaacccaataatcaacanaaacccagaggggaaacgacctcctttcagcangactgggaaacccttgaaggcaggaactgagccttcattccagcactaactcaacaaacatttcctgagctgtccctgaagccaggccctggctgagaatgctgaaaagattcagagcagatacacgtgggctctatcacacaaatttcatccatgtgtnctacccaagtgataccacttgctctttctctgggctnccccagtccctgacacagaactttttggtcaccaacctaatcattcanggattataactgtttacatgtcagtctcctctcttcgtcccctgacagcagggatatggntggcccttaatgc

SEQ ID NO: 1128 - DNA, 437 bp, Homo sapiens
  misc_feature 7, 16, 26, 30, 57, 64, 65, 96, 101, 115, 116, 119, 120, 121,122, 123, 124, 141, 147, 157, 162, 165, 166, 186, 200, 218,238, 240, 251, 256, 261, 323, 325, 372, 385, 417: n = A,T,C or G
gtgaggncacacgtgnaacaacacgntgtntgtgaaccatgaaagggagcttcgacngacaccnnacctgccacagccttgatcttaacctttgcngaagncacaactgagagannatnnnnnntgtggtttataacccanccagtntatgatattntgctncannaacctgaatggactaagacnctccccaccatganaatgtccaaacataatgngacagatgtctttacatcantngtggatgctgngacanaggcntttacaaacacagagcaacccagggagctgatcagcatgaatgaggctggaaggaggctcananaatccatctttccagtgaacttggaacaccagaaacaagtggagcanaggggagagaatntctttgaaaacgcagttgggagacagagccangtaacgggaaagaaacaagg

SEQ ID NO: 1129 - DNA, 438 bp, Homo sapiens
  misc_feature 344, 347, 397: n = A,T,C or G
attaaaaagaaaaaagaaaatcaggtgggataaagagcctcaggtctaactgaattgtcaactaatgatggtctgagagtacctgtgctgaaatggaattgtctttgagtggacacttcttagatgagacctattgtggccaatagctcctgaggaactgaagccttcagttcaaaacttgtgtgagaaaaatgaatcttgccaactactggagtgagcttagaaatgaatccatccccagttgacccttgaatgtagccttgtcagagacccagagacaaagcatcctgctaatctgcactgggttctaggcccacagaaaccatgggataataactttgtgntgnttttaaccccttgaaaccaaccaaataaaatccttaagatgttcccctgnggaagggttccattggcagggatctgcacttcacaaccaaa

SEQ ID NO: 1130 - DNA, 442 bp, Homo sapiens
  misc_feature 370, 376, 391: n = A,T,C or G
ggcaaattaacccagaagagtacttcagagaacacagacaaactgccgtgcagtgaagagaatgtggcaggaagccctggtattctagaagaagctctgcccactccagacaggatccgcacgcctagtgccatgtctatctccaaggagatcacattctagagccaaggaccgccactgagaagaaagtaaccgtgagccgtcagaatgcatacctggagcgctccaggaaggaaatctcagccccggcatcctccatggtcacacggagagggcgggtgtccttgtagctttggccctgagatgggagctagagctggacacagggttctagtcctggcttttgtggaaacaagttcccaaacctggngcaagngccttacctgtctgngtaatggggggagctgatgtggatcatctttaagccctctgcaagatggag

SEQ ID NO: 1131 - DNA, 440 bp, Homo sapiens
  misc_feature 360, 361, 378, 380, 384: n = A,T,C or G
gaggtggagtcttgccatgcccttccattacaaaatcctcctgttccacctgcaaaggcaagcaccacaggtcagcagcagtcagtaactacaatgcgactcactccaagaacccacacctgccctgtgcagaaccacagggccgtttcactgtggggcacagaacagaagcctgggccaatggttttcaaacttctccttgagtgattagatctgcagaaaaaaggaaacatgttgatcggcaaaacacataactctgacaaaggattagcatctagaatataaaagaacggtgatgaatcaatgagacaaagacagcctactagaaaaatctggaaataacccaagccgggaatttcnntgaagagaacacataancngttntaacatatgaaaagatattcaatcttatgtcagtcaagaaaatgcaaattaaaacc

SEQ ID NO: 1132 - DNA, 434 bp, Homo sapiens
  misc_feature 344, 346, 357, 365, 379, 402: n = A,T,C or G
gaagaaaatgttaaaaagtaataaccaaagaaaaagtcagccaactcccacagcctggtcttgctgtgctgaatggcagagaagatcacagaggaagaaaaaagaaaaagacagaaaaaaggaggcggagaatttcttgcttaaactggacctagtccagctggcaagaagaggtggttttcttaacgcctgcaaaacctgattactttttttaaaggaatgaagaagaaggagatgtaaacacagccattaaaacagatttaaggtacttagttttaatctagtctaagaccttttcaattgtatgctgctctgcaattctctgcttgctagacattaatacngngcataagcccntggtcagngtcttttaaccagngaacgctttcagctgagctctgnggttaccctctcaggtcaggcatggaaggcct

SEQ ID NO: 1133 - DNA, 437 bp, Homo sapiens
  misc_feature 341, 349, 354, 361, 372, 386, 403: n = A,T,C or G
gtaaacccagttcactcaggcagaagcaagaggaagaacattcctccagctcctcctcatgcaggcccgagaggtgggagggcattctgccagcccagtatatccactttgcttcgacaaatgtcagcctgcccagaataaggaagtacccacagccgggaaaggtaaatccaaaccctgaaaagacagatactgagcatttgaaataacacagcttgcagcgtccttgcggagccctgtttatggggcaataaaccatttaaacgactgtgtgttggaacccacaaggtcgccttgaaaggcttttcacagacactgctagtagggctccaggacctctngaaggccnagatnggggggnctttttgcttntgcttgaagcttgntggttcccctccatcangaacgccagcccctggagaggctgccatgagaaa

SEQ ID NO: 1134 - DNA, 341 bp, Homo sapiens
gaagaaacacaagatttaaggttgtttgtcaactgacagccctttctatcaacaactaaataaaaaaatctgtattccagaaacatgacacttcatgtaccacccattttcctcataagaaaccaaaaggtgtccatgacttaggtactaaatggcaaggctggaaccagaatccaagttgcccagtcacacagttttggtttttaaataaccaaattggtcaaaaatcttcctcaaagacaaaaacagatgaaggtaaaatgccaattggttaaatttaaacagagacttcactttgttcttttcaggttcaataataaacaattctagtgattagcatg

SEQ ID NO: 1135 - DNA, 442 bp, Homo sapiens
  misc_feature 31, 34, 349, 373, 382, 388: n = A,T,C or G
gagtaaacgatcccaattgcagtatatctgnggntcatctggcttcttctcacaccacctctgttgacatgggaggcctgccggccacacatccaggaagtatgaaatcagcggggttcctccccttcttgctccagggaagcctgagagggactctgcagattgcatttggaatccatctgccagggaggggtaagaagaagcagagtgtcaccgggtaagagtcgacagttttgaagactcgtagctgcgaatctttcaggaaataatccagaacagtctcctcgctggacaggaaaggaaacctatcctagagaggcgaatcctctgtcctggacccctgccccanaaaatgggtcaggggaggggattntttgggggngtttcnacctgctgcttgcagggcttcggttgccaagagtttccccaatacctaaacccc

SEQ ID NO: 1136 - DNA, 434 bp, Homo sapiens
  misc_feature 339, 385, 387: n = A,T,C or G
tctccatgctctggatagaggaggttcacaagccagggcctgaagattaacagagctttgaagccaaaaggtgacccctggaccatggacttcgcacctcctttcttaagggctttaaaatagaaaagaacaggagctagaagatgaggcagaagtcgaggacttctgtttttctggaaggctcctctgagccaacaaggccagggctgttctggatttcagagcacaaagaggctcctggagccagccatggtctcctgaggcttttaccaacttgaaagcagcctttctccagggcagaaacgaagcatctccccagcgctcgccatcctcagctgntctttacaacaagaactttacaaggatgcccggatgaaggcccaananacccgcgttctgggcaagccacttttaccacaccgactggatccccc

SEQ ID NO: 1137 - DNA, 433 bp, Homo sapiens
  misc_feature 371: n = A,T,C or G
gtacctaaggcagtaaacccccaactccctggaagggcccactgggcgctcacttcgctccagagcctcgcctggtttccgcttcgggatccggtcacccaacccagctctccagttgctgctgtttctcgtgagactgtcagagtgaaggggtccaaagctccgacttccagcctcagaaatcccaactcaggcaggatcagcgaagcgtccctcgcagtggctggagggagagccaggcggggcccaggctgccacttatcagggctgtaaatgccaccctgaggcccacgcctgccaacactgctccccacaagactaagtcctgcagcctcagcccaaaaagaaccgggcctaaccccaaaacgganggtcatgttcaagccacaccccagtgaaccctggcgacccaccccacagtgccctgccctcc

SEQ ID NO: 1138 - DNA, 443 bp, Homo sapiens
gactagaactattgccactgaggggcaggtgggaagttcagccaactcggaacccggaggccccaccttacctccctttgtgaagagcccagagcctttgtccaaagctgcatcacttcccacccagcccttcctgagccaactccccgatgtctccagaagaacacagtcggcatcatcgtgataacatcagggaaactcctatttccagcagtttctccttcagctgcaaaaatgtgcagcagtagacagggcgtgggtttttgaagtctctgcaggaggtagagttattttctcagcaccacatctgagcgcatcttctaagggtggccgactgtgtgggaactgcaagagcttaacccgggatgcaagccctcccattccccaccctgtccactaccaccacgcctggatccgacaggcagggcaggaccccatgcccc

SEQ ID NO: 1139 - DNA, 405 bp, Homo sapiens
  misc_feature 23, 24, 25, 27, 30, 44: n = A,T,C or G
gctctggggagctcctgcattannncntanctgagtatcatccntctgccatcaagaatgtaagtatgaagaatgttccgacactgctccaggactgtctttcaagccactgacaaccatcctgcaaattttgatactggtgcctgtttggtgtccctagaggatctaaatgaagatgtgaaaacaacaactaagaaaatattttaaatggcaattactcaacacgagaagttaaaacaatgtccacactgagactgaaatgacagcaacagaaacagcaagtcagagccatgcctgtacaatgacaactagatcaaaactgccacctggccaaaagcaatactcagatgctattaactgtaagacagttaatggtatgttatgaggtgaaaaaaaaaattcctt

SEQ ID NO: 1140 - DNA, 448 bp, Homo sapiens
  misc_feature 3, 346: n = A,T,C or G
ccnttttgatccccacctacaactgggcatcgctaacaacccatgtgaggtacctaggaagaatgagaagcttccagcaaggcagctgcttccagcagcaagctcctgcatagcccacaggccattccagctcaatgctggagaagaatcttccccctaacagcactgcccagcactacccaactaaggcttctctggttaaactgcccaaggatgcccaaagaacttgtttctaaaggaaggaaaacagatgccaagacttcttgtgctttctccagggggctcagagcaggccctgatcactaccctggatgcacaaagtatctatcaaattcccacaaggtanaaagggttgccaggaatgggaagaaacttcaatattcgaagtcaccaatcacagaagataactggcaaaacagttctactaagcaagcacagagccatttgc

SEQ ID NO: 1141 - DNA, 458 bp, Homo sapiens
  misc_feature 357, 389: n = A,T,C or G
aactgaggtggtggtggtcaagagcaaggtcgaggctcacctgtgcccatttggttccgtacattgctcactagaggcatcatcgacagagtatgaatcagctccccaattagcctgaccgtaatcacctgtgttgcttgattattatacaaattccccgacctcataccgacctactgaatcgaaatctctaggagtagattctgggaatctgtatcgctggtaaagctcccaggtgattcctataatctggcaatgtgggagacacgagcattaagggaacccagcaacaggctccatcctctgcctaacatcagcaacctcagcagagacttggtcccagggacccttgttccnttatgtaccccaagacactgtccctaaatggngcacaaaagcaagactcaggcctgtctcacacactggcaaagctgctgccccccagctcaaaccagctc

SEQ ID NO: 1142 - DNA, 451 bp, Homo sapiens
  misc_feature 343, 354, 395: n = A,T,C or G
aagcttgtgagacctcaatgagtcatgaagaatcctaatttcaaatccaaagaatccaaagtgatgataacaaaaagcaataattgatatctgaacaaagattcttgggcagccgagcccctcttgaattcctcagcctaccatcatgatcaacacctcccatgttccgtccatgaatgaccgcactgacagcactggagagatttaatgggtcaccaattgaggcagtgaaggcactcatggcactcagagctggaatggggctgatctgagttgtactgttgactgcagtggtgatgacaacctgcattcctttgctggctgcatcgacaactgctttgtnaatgggcattntaccggaagcatcacctggggccacccacaacgaggccatncttcacctgttgaccaagagatgggtcaatcctcggttgcaactcacaaggtgttc

SEQ ID NO: 1143 - DNA, 450 bp, Homo sapiens
  misc_feature 348: n = A,T,C or G
atcccttctggagctggtcctaattgcttttcacaggagggatgcaaactggaaagttcctacctattcagcgaaggcactccaagtcctgggctcttttctcctcgggggcaaagatgagacttctcttctgtagagatcacaggtgcatctgtacaggttggagtgctcccccaaccctggacccctaggagcggccgtgatttgtgacacaaggccccacccgttgatctactcttcacacagccgtggagagccaagaactgggagggaggaggaaatttggagacagagacacacagggagaacgccatgtggaggtgaagataaagaacacaacggtgcttnttacaacccaaggaatgccaaggacctccagcaaaccaccaagaagctcagggggaggcacagaacgaattctttctcacagacctcagaaggaaccaacca

SEQ ID NO: 1144 - DNA, 452 bp, Homo sapiens
  misc_feature 312, 390, 396: n = A,T,C or G
tcagagtttacaccttactgtacggctgaccacctgaatcccaatctcacgaaacacccacaacccctgggcattccctgggcactacccagcaaagccctatctttgcatcggtctcagaaggagtctcccagatgctgcaccagctgcccagcgctgctggaggaaatctccaccgctgcagaaaggccatccctccactccctggacagccctctccacgtcacccacctgggtcctctcctactccctttggtgcctggtctttcccagcagctgcctacccccaactccctgctattcaagccctgnaggcaccttgactcctaaatgaatgaacttaactgcttgccctgcccccttattgatctgccagggtttccacccttncatctnttcagggcctgcctttgcagcacaagccaggctgccatcacctcatgttccaatta

SEQ ID NO: 1145 - DNA, 258 bp, Homo sapiens
  misc_feature 182, 190, 193, 195, 209, 214, 217, 235, 245: n = A,T,C or G
ctgtcctgagagcacgtctctacatctctacctgcattctggaatcaaggggaaaaggccaaaacggacaagaacactagaatcagcccgtgtcccaaccctttgactacaagggacttttcccgcctatctgtggtggtgggtatcatgaaaattatgcacaaaccttttttttttttaanctcatcanctntngttagcattagggnatttnatntggggcccaggagcattntttttccaanggggccctgaaaa

SEQ ID NO: 1146 - DNA, 445 bp, Homo sapiens
  misc_feature 316, 320, 342, 355, 385, 406, 432: n = A,T,C or G
gcactcattctctttcctgtcaccctgtgaagaggtgccttccgccatgactgtgctgaacgtgtcctccaagggtttcaaggttatcgtatgccctgaaattgggcaaggagctttaagagggaactttgagtttgccagagaaaactcaagatgtttctacatgaagaaaatggtttcagacatttgacttctttaatttttgcatactctttgtgatggttgttagcaaagacctaaagtggttgtatggctatttgcaaaggctgagtgtgacttgatattggctcaacttgaaaactttgatatttgatgnttgnattcaaaattggaaacaaaggnggttaaaaagggnggatatatgaattatgggggggcatataanactttgcagaacttacctgcnccttatatattttctgccaaaatagntgttggtttgatg

SEQ ID NO: 1147 - DNA, 437 bp, Homo sapiens
  misc_feature 348, 397: n = A,T,C or G
gtttgcctgtttcctctggttccagtccaagcatttgtgctatccttcgagtctttacaaattgccctgaaataatatgtgctgtgcctgcctctgtacagttcagctcacctttgagacatttcgttgtgtttgttccaacagcggtcaattgtgttgtatttaccccagaaatcactgctaacaccagcataccagccgccctttctcgtgagcttgtgagtggtttacggagcagaaaaagagttaatcgatggatatgaattaaacacaggaaaccagcactagaggaacctcagactccaggcctaaaaccacttgtgactggagtgacgttaatcacaaganaagggagcctccatggtaacaggatgctgaaacctgacacatacaaggnactatgcacttttcaaagcacttacatttgatcactcttg

SEQ ID NO: 1148 - DNA, 453 bp, Homo sapiens
  misc_feature 337, 340, 349, 368: n = A,T,C or G
gcttcagtttaaaaggactgcctgtcctagctgggattggagaattgagagaaaggcatgtgatcctcccgggacccagagagatcagcagaccagaaggcctacatgtacactggaaagcccccaacccaggaatccctgtacgacttgaggcattatctcactgtgcatggctgaagcggtagatgccatcattaccctcatttcacacctgcagaaactgaggtatagaaacattaactggtctagtcacgagggattctgtgatgcctgagacatatgacctgccctccaagaccataagtgacagaccaagaatttgatcccatgtcctggnggncccacaagnctggggcctttaccattanagcaggggtttcctctgggggttctcttgtccccaggggacatttggcaacatctggaaacatttttcgttgtcacaaatgagct

SEQ ID NO: 1149 - DNA, 451 bp, Homo sapiens
  misc_feature 83, 395: n = A,T,C or G
ctgaagagcattgaccaagttattatcttcaactctctcaaaggggtgaagagagaaaagcaacactgagtcaactggctggnttttcatccctttctcttcttcagttgtgggctggagagagatgtaattccaggacattggccagccttttgttatgtggatacgctttacacaactacagtttatccatcagaatgaaatacagacaaaagctgaggaaatcagtcttcttaatagatagaaagtgatcctttctgcctccaaataaaactgaattataacattcttcgtatttctctgggtacacatctggtttaaaaattagaagttaaattttaaaagtaggcagaaggtttggtttttagaagaaaagacattttaactgtaatagnggatcattattttaatgcttataaagtccaatcaaagataaatgtcaaaccataac

SEQ ID NO: 1150 - DNA, 351 bp, Homo sapiens
  misc_feature 2, 289, 298, 330, 332: n = A,T,C or G
cnaactgagaaaagcaaaagatatttgccaatgaacaataacctggatgctcaaaggatgataaccctgaggttgagggataccaagtaccttgtccacaattcagcaacaatgggacaggtgtgatacaaacctctttttccatcttgttctctttctgcttgaccattgcaccattgagagaagtgaaacttgggctgagtctacaaggggcacccaaaataaccatggtgtgtttatgttcatttaaaatcataaaatttgtgtaggaaataaaaaaaaaaggccngcgaggccnattcagcttggacttaaccaggctgaacttgntnaaaagggggggcctcccaa

SEQ ID NO: 1151 - DNA, 244 bp, Homo sapiens
  misc_feature 21, 28, 33, 39, 41, 45, 46, 59: n = A,T,C or G
ctctggggagctcctgcattnctacctnccttnagatananctgnnggctggaatgtanaagtggacttttggccacgtggatgaggaattgaagcagtcagttctgatctagagatggaaggcgcctgctgaggacagcagggctgcttggcaccctgggtccctgaatggctctgtggagcactgcctgatggcctaccctggactgttgcctgagacagaaataaacttttatcttgttcc

SEQ ID NO: 1152 - DNA, 573 bp, Homo sapiens
  misc_feature 14, 19, 35, 64, 75, 82, 101, 111, 132, 285, 407, 414, 423,427, 440, 460, 463, 464, 469, 486, 506, 525, 545: n = A,T,C or G
gttttcaagcaaantggcngtaattggaagaaggnaaaacgcccagggtgccttaatttagggnccgtggctccnaaaggtnattcggtccccgggtttcntcaacttgtngaatggatggaaaagcaatgngtttaccatttgggcggaaattttgaaaaatcattggatggaccacaagaagcttgggggaaaaaatttgtttgttggaaacctcacaagggcaagggctaaaaacaaaggttgtggggggggtgggatcaagccccaagaattttgaccgtngccaaacctcaaaaagaccttgggaaaaaaaatgggccaagaaataaaatcttgctttccatccccgcccaaggttttgggttttcaatttggtacttggaccaaccttcaagcttgggcanttcattngggacccanttgnaaagaaaagccanggaaccgaaaaaaacccccnccnngggangggggaaaaaaatcctngggggaatttcttttttttnttaagggggatgggtaaantaccattattatttttaccnaaaataaaaaaatggccctcatggcaca

SEQ ID NO: 1153 - DNA, 845 bp, Homo sapiens
  misc_feature 14, 15, 28, 87, 94, 99, 105, 176, 487, 592, 639, 660, 669,701, 719, 733, 793, 801, 821, 822, 831: n = A,T,C or G
gctacgatgctggnntaaatctttggcntggcttggctcacttcttttgggggtccaccacttggccttttattgaagcttggtaancacttcnaccantggaanggggtcttggcaagctttcacttccttggaaagcccaggcggaagaacccacaaaaaccccacccgggganggaaatgaaacaagctggcaaggaacgccgccggccctttaaagatgcctggtaaaccacttcacccaaggaaagggtcccgcaagctttcacttccttaaaagcccaagccgaagaaccaagggaaaccccccacccaagaaagggaaaaaaaaactcccgaaacaacatcttgaaaccatcaagaaaggaaacaaaacctcccgggaacaccgccttgcccttttgaagaaacttgtgaacacttcaccccgtgaaggggtcccgccggctttcatttccttgaaagtcaagtggaagaaccaaaaganacccacccaaattcccgggacattgtttccttcactttccttttaataagcttaatttaaaatggtgaactttttctcggaggggttgggctttttggaccattncttttggggaaaacaagcacttccttaatcaaattggtcaccctttncccttgctttggggtttttgnttatttaanccactttatttgggccatcttcttggggccanaagaattttattaagccnccaatttaaaatantcccattttggcttacccaagccttccctttcattattaaccccctttgccccaattaangcaagggnccccttataaaaccaaaatnnggggcttgnggaggccaaaaaaa

SEQ ID NO: 1154 - DNA, 582 bp, Homo sapiens
  misc_feature 500, 519, 528, 548: n = A,T,C or G
gtgcctgtctgaaaaccagttcctctatgactgtgatctccaagtgatcaaagtcttgtcctggaagccagactagtgatatgcaccttgtaccttgctcctcaaggcaccaacaaataggaatccagagcaactttcttagctggagtggcttctatgtttctgactggactttcacggatacaaacagtggggctctttgcaaaacactcttctaagctttcagaagcaggtcataaagccgaaaaggacatttctgcctttctctgaagcaggtcataagtccctcattagagaagtatcctccctatacctgaagaaaaggaacatccttatctatgaagacacaggaactcagagaagaatctgaacaaacaggccttgcaaaatgccctccagcttcctgccattagatcatacctcctttttccggccatacttctccataactatccacttcttcatcagatctagcataaaaacccatctggtttactggntggcttgggtcttcatttncttatgaangctccgcatacgtaaaaacntacgttaaaaaaaatggggatgcttttctttggt

SEQ ID NO: 1155 - DNA, 627 bp, Homo sapiens
  misc_feature 584: n = A,T,C or G
atgcatcagcagaacctaccacacggcacctactgcgggcttcagttttgctgtagaaccgagaaacatcacgttagatgctttagcaacaacaatgtatatgttgcatagaagaaaagtgtcccagaagaacagccagctgtcctttacatgaaattgtggcactgcctgtaagaagtatatccaatgagaacttgtcctcaccatgtaatacttttaatgggtgagccatttcaacactttacatactgccgagtaagtttctacagaactttctcattgtactcagcgctgtctgtgcagttaatttaggcatcagaaaactcagttgttaattttctgacttgcctctggactcttaaatgctattgctccaatcataacacgtcggaacacttacgcagatttcaacaataatatccacagctgggaataaatcaaagcaggtttatcactggataagtgctattggaatatgggtaccaagacaacatgaagcaaaggacagatttcactttagaagattaagacagagccctgggggggaaaaaaaagaggtaatcccaacaaagtctatgcaaccnttaaaaaatattattcagagcagaaatgcagaattggcctttg

SEQ ID NO: 1156 - DNA, 598 bp, Homo sapiens
  misc_feature 18, 26, 32, 34, 35, 37, 71, 81, 199, 200, 206, 237, 238,354, 508, 515, 567, 579: n = A,T,C or G
caaaactgaaaaactggntgaccttncgcttngnntncaacaaaccaagactagctttgactatgacaatnggtatctaangaatgccagacaggatggatgaagaccaggacacaactcactccaccaaactgtgatgttacgtcatttaccttggtccccacccactttgcctttgaatgaagacgtgtccccagcnnttgganaacgagaaggaaacacgccaaattaaggtcnnatttacatcaacagagaatatagaggctcaagagaggaattcacttaacttataggaaaacgaagtcatattttggcacatcgagtttgtagtctttgagaaatgaaaatcctcancaaaaagcttttgtctgaccagctgtgaggtaagaatgtgcaagaagtcaaagcaagcgaggaggcggagccggtactgtcctggaaagcaaaacccagaaaggtggcgaatctgctccaaagctgcctcttttctgctcctaaggaagatgcnttctcangatacagggattttgtgtatgaaaaaaaaatggccatagctgcttacagaanagaatgggtggnaatgccaatttttgactat

SEQ ID NO: 1157 - DNA, 284 bp, Homo sapiens
aacctcaggccaagtgttcttgacagctcatccacagactcccactggtaaagcagcatgaggatggcttctgttattttatttcagaattttttcctgcagtggcatgccagtaccagctgaggatcatgtatgcaatatttgccttctttcatcttctacctaggatggctttaattctcttcgaggagaatttattttagtttttcccagtaagagaatccacttctcttgcccatattcataaattatcattaaaaattaaacttggtacaataaatatt

SEQ ID NO: 1158 - DNA, 759 bp, Homo sapiens
  misc_feature 14, 18, 25, 33, 39, 55, 59, 76, 151, 153, 168, 231, 241,248, 251, 286, 312, 345, 346, 349, 515, 555, 563, 571, 622,631, 694, 696, 698, 701, 714, 742: n = A,T,C or G
ggctaccctcgtgntganatgaatnaactggcncctggnggccgaaaagcgaggngccnctttgttttgggagggncccgtaccccgcgggaaacccttttttgcccgaaccaagcccaagcggaatggtttggtcttcggcctggccaancnaagcccccccaaganggggccaaagcttcttggtggaaactaagtcccaccttgttgcgggaaggcccgggggtcaancccaaaagtnccccggncanggccaagcaatcggtcatcgggggccctataagcngggaaaagaaagaaaaagccacaagncaaagtatcttggcttgaaaaaaatgggggggnntantaaacgggaagtcttcgcccgtgtcaccaaggcttgggaagtgtgccaagtggatgaagaatctcagctcacttgcaaaccttcacctccttggggttcaaaagtggatttctttcttggcttcaaccttttcccaagtaagcttgggaattacaagggccccggnccaccatgcccaagtattttttggtgggccaagaagggangggaaaanggaaaggngggggtaccttggaaaacgaacaagcttcttttccccttggggaacttggnaagcaattnccgaagcaccaacaagtccaaccccggccaagcctttttggtttccttggcacaagtcttggncntnttnaaagaaaccaacnaacttccattatttttattggacgaatnaaaaaaatttgggtagg

SEQ ID NO: 1159 - DNA, 501 bp, Homo sapiens
  misc_feature 9, 15, 29, 31, 32, 36, 50, 52, 58, 62, 71, 73, 75, 77, 79,80, 84, 93, 102, 111, 171, 204, 381, 428, 444: n = A,T,C or G
tcagaactngaggcnacccttgccaaggncnnctanccccttgggggccntnactttngccntaagggccntntngncnncaancccttgacnaaacttaanggagtcccntcgaaaccggggccaccacctttcttcaccttttgcaaggcaaggaaggcccggaagggntaagccctcaagcgtcaacgaagttcaaaagancttgggttacccagcaagtttgccccatctgctcaagggatgtgggccttcttcttgatgaagtaagttgaaagtgcttgggatgtgaaatcaaggaactcggagctcaaagttcaatgaagtaccttggaaaattggattggggaagctggcccaaggaaaatcaggaaagaaaanaagtcctgaagattcaaggaagaaagtaaaagcccgcctggcttganaatgggggtgggccanggccaaaccttgatcaagggcccgagcaaaacccgcactctttccaaataaaagctt

SEQ ID NO: 1160 - DNA, 736 bp, Homo sapiens
  misc_feature 2, 7, 11, 13, 25, 26, 32, 54, 59, 63, 64, 65, 67, 69, 115,117, 123, 135, 137, 145, 159, 160, 165, 170, 179, 186, 209,247, 328, 354, 395, 404, 549, 565, 633, 636, 651, 663, 668,677, 678, 709, 712: n = A,T,C or G
gntaccnactngnacccagtggatnnatcaancacgaagccctcacttttgacntcttngcannngngnaaaatttggagctgggatttcattgcccatgggcaagatggggaananggttancctttggcttananacaaggangggaaaaacccaannctttnaccanaaaagaaancttgganattctttggggttcttggaacangaaccggttttacctgggcattttttttaacaaaaacnaccctttaacttggcttatttaacccggcctggcttcaatcaacccacccttggggccctggcccccaagtgggccaatantgcccttcacccaacctattgggcanttaagcccacaaggcccaaagaataaacttataatatcaanaaatggaantaagaaaagaaaaatgtggttcacttgggaaaaacttggcttggttggaagcccctcccaatgggggaagcttgaaggagcttgtggtctcttgcaaggccattggggggaacttgggcccacaaagccaaaagaagtcaagcanccatggaaagcccccnggagcttgtaaccggtgtgcaaccaaggccgcccaattccaaacaagcatgggggaaaccaacaagtnggncgccaaatcattttnctcaatttattngggcnaaaaaaggnngctatttttttcacccttgggtaaggtggtngcntttttggagaaacttcccaaatta

SEQ ID NO: 1161 - DNA, 458 bp, Homo sapiens
aagacatacatcatgagagagagagattacagtatgcaatctctcagctgccaacagaacacagatgggcttgggaacagagaatgatccagatctgcaggactggagcaatccgtgggaagtttggacagaagatctgatgcataagacagtaaaggactactgaatgttccatgatagatatgcttgttcttttgcctgcatgcccttgaataaagacattttgatctccaggaccaacctgagaaacatataatttaatctagttttgaaagaagagccctgctacacaaatactggctcacaatgttaacagatatcaactgaaatatcaaagggctttcatatttcattaaattgactatcctatgtgtttgatatttccatttaattgaatatttcttaactcaatgaaaaatgtatgagcctgctgtgataaatcccgtgtcgcatatggg

SEQ ID NO: 1162 - DNA, 264 bp, Homo sapiens
  misc_feature 50, 65, 90: n = A,T,C or G
cagaaattgagaatcatttcacttttgggggaacgggaagctggttgtgnaccacccttatgtgnaccttcctgtccttcagctacatcngatgaaccttgggcagtgaattatctaagtcccatccaagcttccagaaagaactgcagccccagctgacagcttgactgcaacctcatgaatgtttctgagctaggaccacccagttgcttctgaattcctcaccctcagaaaactatgaatacaataaatgctgattatttt

SEQ ID NO: 1163 - DNA, 882 bp, Homo sapiens
  misc_feature 8, 12, 60, 75, 91, 110, 111, 145, 162, 214, 216, 220, 371,412, 438, 462, 464, 465, 487, 498, 539, 559, 599, 630, 660,710, 715, 774, 780, 836, 839, 840, 849, 867, 869: n = A,T,C or G
agtcaganactngaagcccatactttcccaattgccttccaagcttgtttgcaccggganggtttcaacaatcantatttttccaagaaanggcttccttgggaaaaganngtggaaatattggtggtccccaatccaagaaaanccttgaatggggggganttggtgaactttgggcttgcttgtccattcctttcaatggtcaagccccaananaaanatctggtggtcaagccccgccacaaaccattacttggtttaaagccaagtggggaatgaaaaagtggccaaagccttgcccaaagaaaaaaatgggtaaaagggaaaaatgtttgcccccaagggaaagaaaacacccatgggcaaagatnggaaaccaagtaaaccagggggccacaatcaaggggggganaacaccgaaaacattaccgggcccantaaaaacttcctttaattaagaananngtctaccaagattaaaatctancagatgaacanattcctcaaagttgggaactttgggcccattgaatttgggnttggtcccttgccattactngatggaaaactactggatggtccaagcttgggtctgaaanggaccccttacccagaaagccttaaattcantcaaaagaaaatggcaaatttcccattatncctaaatggaattcaaatcttccctttaccccttggaccccaatcaaggnggggncccaaaaatttttcccaacccccctttggccttccccaaaaaaccccccaacccccaanaaaccntcttttaaaaaaaattaaagaaatctttccttccttaactttccttggacttcaanccnncccattgtnaatccatttaaaacctcntntttgcttggaaaa

SEQ ID NO: 1164 - DNA, 828 bp, Homo sapiens
  misc_feature 355, 559, 561, 564, 626, 645, 671, 708, 722, 784, 797, 798,799, 811, 813: n = A,T,C or G
cagatactgagaacacaacaaaaagaacctgtcaccacaacaaagaggggaaagtggaccaagtggcttatcttgaaaccttgtgggtccttggggaagcccaggggtgaaccctgaataatgaacatctaaaaagaaagcctttctgggaacttcttgaaacaaagaaatttcggtgggccctgccaaaagctttgcccaatttgccacttttttcaaaatgcccttttgggaatgaacccaagccacttttaaatcttgaaaaccttgcaaccaagaactaagcccaaccacctgggcccatgaaaactttgccccctttcacttggatctgggaacttcaaccttcttgganccctaacggctttttaaagccaaagccacttaacttggcacttttaacaagaaattaaccccaacttgggaatcccttgggaacccaacaagaaattccctttcaaggaatccctttctttggctggccaagaatggaaagccaaaagggaaattaatttcccccttcaaagtttttctaaagtgaatttccaaaaagccaaangnggngggtggaaaatttcccaagtaaccaagaaaaccaagaagggttggccccaatagaaagtaanttttttaatctaataaccntcccctttgggtaccctagaaaaaangcttatttgagaactaatgaagctccaccagaaccangggcctttcgccancaaaacctccaaaatcaataaattgggaccatggttttaaatggattacctggggaaatccntggataggccctnnnaaaaaggggganangctaattaaaacaaa

SEQ ID NO: 1165 - DNA, 660 bp, Homo sapiens
  misc_feature 45, 66, 112, 157, 193, 194, 421, 431, 438, 459, 490, 492,494, 506, 525, 562, 576, 599, 605, 608, 616, 630, 639: n = A,T,C or G
tggagaaaatgggattgggaaacagaagggagaagaaactgggcntttaccataagaaggttgcanaacaccctttaaaaacctaaccttttaaaatggcagtgggaaagcnttcaacatggaggcctcgtctaatttaaaacaaaccacacagacncacttggcccaaaagcagcgactggcctctgaagannaaaaggtggggccctgcaagtactgggctgggaaccacctccacatctgaaagaatgctgtttgcctgtatttgcttcccaacgtccttccttcccttgcctggttgcctgttgggcctaacatggagctctgcccacagtaagtgtcgttactatggccactagcccataccaaggcatggcctttgcaagtccccaacatacagctcccgacctcacaagcaagnccatctctantgctggncagaaagtaaaagttcacacngggcggggcaaaaagtcctgctcattccaangnancaacgcaccctnaacaagcttttcccaaaangcaactcaaccactctttagaattttttttttttttnaaaaaaaaccgggnttaaggaacttggcaaaaaaaancccccnagntggaaaanccctggggaaaaantttctgggncccccccccggggctgaactt

SEQ ID NO: 1166 - DNA, 643 bp, Homo sapiens
  misc_feature 47, 72, 77, 79, 82, 84, 88, 91, 94, 98, 101, 102, 110, 112,137, 150, 305, 360, 431, 452, 473, 484, 527, 593, 594, 599,603, 627: n = A,T,C or G
cagaaactgaggtatattagttcttatatgaatggacagaagaaacnatggaaattggagggaagggaagangaacncntanangggngcntantttngcnncccaggtngnccttcaattaaaagaacctttggcntccagggttcaangtggattctttttgcttcaagccttcccgagtaagctggggaactaacagggtggtcaaggccttcttgaccccaagcctaaagcccatcattatccccctggtggatcttgcacctaacccatcccagaatggccctgaaagtaagtgaaagantcccccaaaaagaaagtgaaaataagccttaactggatggcattcccaccattgngaatttgtttctgccttcacccttaactggatcaatgtactttgaaaatctccccgcaccctttaaaaaangttctttgtaattctccccancctttgaaaaatgtactttgngaagaatccanccttctggccgcaaaacattgctcttaacttccaccgcctatnccaaaacctataagaactaatggataatccaccaccctttgcttggacttctttttcgggactcanncccgnctgnaacccccggtgaataaaaacaagnccccttgtgtcccccc

SEQ ID NO: 1167 - DNA, 629 bp, Homo sapiens
  misc_feature 6, 10, 15, 71, 80, 84, 244, 248, 257, 278, 314: n = A,T,C or G
tcaganactnggagngaagaacaagctttcccaagggcttggaaaagaaggggggaagtgccgggaaccantgccttccnccantaaccacttggcccacttcttggtggaaccttcttggcaagcaaaaaaccctggaaacccccaaaagaaggcaagctttcttcaaaaagtaaaaaagtgggaaatggaaagtttccctgggtggaaccctggaaattccccatgggaagggaaaaagatngganaaaagggancatttattgccaagggaagantgggcatctcgtggtccccttgggttgaaacccaanattccattaagggaaagaacgggtgccaagttgttgaagggtggggacccttgggacccttgggaataaaaaatgggggtggtttaaaccaaaagtaatttgtttgaagtaagggttgggtggggaagggaaggcaccgactaagatgcaagggggtctaagcttgaagttggacaaagaagctaaccaccagggttgttgggaccaagggacaggggggggaccctttaaagccgaaaagaacaccctgcccaagatggtggtctttggttccctttgacctggtgggagaagggcccctttggtgggggtggg

SEQ ID NO: 1168 - DNA, 276 bp, Homo sapiens
ggtgaagccagatgggagtgctgagcttcagggagcagctacgcaaagttaattgtgctcagcaaagtcttctagattaagcggtcgctccaataaagtttcctgattctgtccagaaatcctcaactccgacaataagaagtgggttgaggggcagtttgaatacataatcaaaaagcatataattgaagattgaacttgagctatagcttcatgtattgtctctgcgttgttctattttaatagttgcatatggagacaataaagctacatgac

SEQ ID NO: 1169 - DNA, 299 bp, Homo sapiens
  misc_feature 34, 98, 104, 110, 125, 150, 170, 190, 206, 219, 234, 251,263, 278: n = A,T,C or G
agacgtctggggagcctacctgcattaagtccanatactggagagaaattcaagaaccttggaaagcttaccccaacctttcttaaccattggcctantaaccnatggancaccccttaaggaangtggggcaggaagtaacccccgganggggaaagaaacccctgggntaaccttggaaatggactantattggaaaacaacanggttggcctttanataaccccttcggantcaacttcaacttaacnggaaacttcttntaaataaaaaggtantaatttttttaaagcccaatt

SEQ ID NO: 1170 - DNA, 540 bp, Homo sapiens
  misc_feature 504, 511: n = A,T,C or G
atttctgtgaatagaccagaagcccgacctttacagtgtgtttggggtgcagaaaaccttggctgacatactcaaggctgaaatgcagtcagcggaaatggaaacacttcaactctgcccctgtggcaagaatggcttcccttcagacaatctggccagattctttatggacccaatgggagaaattggatgcttgtatatacctctcagcatctttgaaggggcactgaaacttcaatcaaattggggaaagggagccctgaactttagacctgttttaaatgtgcagagtggcaactggcacaaggaacactttccatctgtaagaaagaatacaaagaacttggaacaagaaaaaagtagatatctcatcagtcaatggtgctgtataggcatgcacaaagatggagatgtgagcaccgacaagatggctggcatctataaggcaggaagagatacctcaccagaaccccataatgctggcctctgacagtaaaattctanctgttgnactatgagaaaataaaattctgtggttaa

SEQ ID NO: 1171 - DNA, 381 bp, Homo sapiens
ctgaatgaagacaaatcttagccctctgagactgatggtctcagaaagtagtcttcagattaccagcttcagaatcagctgatgggttcactaaaatgcagattcccaggcccagtgaggactgaataaatcttagtttcccaggctttacaggaaccatggtgctcagcttctaaggaggcctcaggaaacttacaatcatggtggaagatgaagacggagcaggacacagagttcaccctctctggagaatgtagccaccaggcaccatcttggaagtgaagactggaccctcatcagacaacaaacctgccagtgccttgaccttggacttcacttcccagcttccagactgtgagaaaataaacttctgttctttat

SEQ ID NO: 1172 - DNA, 334 bp, Homo sapiens
ataatgacgactgcaaaatggcaggataaggaccgtccaaaaagcctcattgatgaaagcaatgagaacgctggcaaaaatgatcagaatcggctttttcagacctctggaaattaaccaaagatttgcagtgaggaatgaaatttcagtgaaaagcaatatcctagcagccactggggtggagaactgaagccgagctcccccaaagcctcttcccggagaactgtcattatctgagctgcctctctgttccgtggaagactctacttgcaagactatctttgcctgattgactcggagcttaacccgtaggaacagcccaggggcatttgtt

SEQ ID NO: 1173 - DNA, 351 bp, Homo sapiens
aacagttctagatctccatcgttataaaagagtattaccgtgttggtgtaccacaatttctcaagaaaaacattagctaagcccaagctggattttgatggataacatgctgatgttgtaacaaggctggagcgtggcacatctcacacatgcaggtgaacacccaattaccacgcctatgaactacaaaatcatctaagcagattttaaattagccagttgtttccctaggatcctccaaaggtgatcaatacagtttgtttttttcttggtggagggatctcatgatgaactaatgaatcttaacatgaattgtaagcaaataaataaaatggtatggtttaagccatt

SEQ ID NO: 1174 - DNA, 376 bp, Homo sapiens
gcatacctcaagatcagttgaattggagcacagctggatggaggcctcaggttaattaacttcctttgagagcatccagaaaattagcaaggacatgagaaaccattcactcaggacgaccaatcagccaggacactccgaaacctattaaatcagatttttaatcttctaagcctgtagacaactgtgtgacatcagccacatcctcaaatcttaagggaaacacgaatacaagaatacatgtgtgcaaggaatcatgcataaaaggattgtgccttcagatcaagtccaactgtttttatttgtcatcaaatgtgaacggagatatgggtactagtcccaggaatgccataaactagcagtgaatcacttcttg

SEQ ID NO: 1175 - DNA, 513 bp, Homo sapiens
atatgtattctgcaatcatgaccaaacagaaggactaaatctggatcagaatctgaaatgtaaaaaggctacttgtcaaccacgccattgttttccgttggagctagcagagcagcctcggctgcacattcctgggacgtgaataatatcggttgtgattacacttcagtatctcatccattaccagccctgtgaacactgaatataacctaattaggaaatgcgaagggccctttgctagggatgagtgctggggcagcagaggtccacatgccttcccgacacagggattcaccgggtttcagacacaggtttggatcctgcagggctcaaggacagactttactggtctagtccacattccttgtataatcaccagtaagctgagaatgtgacaccttggattccatcctatgttacactcctctttaaatgcattgcaaaggagatatgccaggacttgataagtcaagtcaatttcaaataggtattaaagtattaaatgaagtgatt

SEQ ID NO: 1176 - DNA, 432 bp, Homo sapiens
gtatgttgcattgtacaagatgaagttagagtgtgaagcatggaacaaagtgcttattgagccagaaaatactgcccaaccagctctcaaggcaaagagagggtgtacgagaagctaatcttcaaatgagaggtggagacccagctggcagctagcatggtgcggcgtgttggaggcaagaagcagaatctcagactggcaagatgcaagggcaggcagcccacccacagggaaggcgtcgccaatcttgagcaactctagaagagaaacctgaacacatcagaactcaaactaactgataatgaactggttttcattacttcctgagtgatcaggaggtagaattgtctcttacaacccaatgtataccattctcagttgtctatttaaggatttcttagtgagctccatggtaaaatatatctacttctt

SEQ ID NO: 1177 - DNA, 387 bp, Homo sapiens
aggggcagacccaggtgggagtactgcaggccacgcccctcgaagacagcatccacgtggtcttccgatactagcaaggtgtgcttggcagccggtgcctcaaggattgttctggaaggatgacatcactcaaggtgtgaggacccagcagacagagcacacgccctggctccatgccccagaggcccatctgaggagcggacaggcagcctttcccaccagagtcaccagggtgaggacgtctttgagccattccctactctgagtcacaacctcgtagctgattaaggccacatgggaagcttcccattcctcatacttcccctgatgctctcaggaaggacaatttcgggctgaaccaaatctggattattaaagtcaattttc

SEQ ID NO: 1178 - DNA, 420 bp, Homo sapiens
gttgctacaataattccagctgtgtatacctcctgggatcataatagaaatgaacctctgaagcatcttactgaagaaggcccctacgttgactgtccagctgactgtctctacccgactgctgtcccacacaatatgggccaggcgatggtattgcctttgcaaactaaatgaagttcctcaaagtgaagctggtggcgacttcagagttaacttttcaaatggccgggcttatatagaataacctttgtaaaagtaaactatgatcatataataagatacatgtgcatttggaacgccactgcttttggaacctgtctcagtttttatcatcatacaaggttaattgtctaatgtcaattagattttatcacaagtgcatttgggtcctaatctggaacaataaaagtctattaaacg

SEQ ID NO: 1179 - DNA, 421 bp, Homo sapiens
ggcatcttgaagcagaccagccacgttgcaagtgcttggaggcacggatgactggtggctgctgttctgggagacagaatcctatagcatccccagtcctgcagcacacaggtgggacaattccagcttgatgtctcagccagcgggttcccacgtcctccccgcctctcccaggcagaagacagagtgacccaggtaaccaggaaaacaaggccataaaaaaggaactcctactaatgaaacctcctagattccaaggaggaaaacgtagctctcagaccaagtccgttttcgcccttgcatctgaaagggagtccggggaattgctaattttgaactttctatacacccttcctgcctctggatgtggccgcctgactcgaattcctttgcacaataaaatgagggggaaaaaaatcac

SEQ ID NO: 1180 - DNA, 115 bp, Homo sapiens
aatacgttccagaggacaaggactgtgttgttcatcacagtattccagaacttaaaaggaactggcacataattggagcttactaatattcgtcaaaaaaatgaacaaatgaggc

SEQ ID NO: 1181 - DNA, 449 bp, Homo sapiens
ataagagtgagcatttttggaaatgtgatcaactgacgcaaaatggcagcaacactggaaggaagaatcaggaggatatcttagaagataaccacagaatctttgcaagagacacagaagactaccttacacctggtttccacaggagaaatggctcaaaatatgttattagttgaacagtaggaaaaatgtctatggtctcttcagcaccatctgtatgtagtctctgagtctccagtttctcatctatgaaactgggataataatatgcaatgagagttattctgaagatcaaataagatagcatgtgaaagcagttctagattccagacataagagtaagattaaaagaaatgttgttctcaattttcttgtgtcattgctgctgccatctagacttaaacaaatgttactgtaagagccaagtaataaactaacacatctaatcg

SEQ ID NO: 1182 - DNA, 506 bp, Homo sapiens
  misc_feature 330, 357, 399, 414, 461, 464, 466, 478, 492: n = A,T,C or G
gtgattttagaggaataaacacccttagccgtcagccaacattttacaaatgaaggccagcaagggaaaggagctcactgaaggcccatgctcattaatgaggaagcaaaaacaacagcacacagcctctgttcccagggccacgctcctcgatttctaagcgctgttccagtccacacaggacaagacatccttttttcttctagaacaacagctcagccccacctgaaagaaagagttcattgatactttttcaaaggcttcacaactcagcttttttggagacttcagcaaaataagtcattatctggccaactttaagaatgaggnttgctaaatgtatcagcattctgaggntatcagaagactctgcacacttgcatatctcacaaataccgncaataaatacatagnttcatttcctcattggttcacaaaaaaaaaaagggcggccggggccnttnancttggacttaanaagggtggaatttnttaaaagggggggg

SEQ ID NO: 1183 - DNA, 510 bp, Homo sapiens
  misc_feature 44, 55, 407, 408, 409, 410, 411, 412, 413, 414, 415, 416,417, 418, 419, 420, 421, 422, 423, 424, 425, 426, 427, 428,429, 430, 431, 432, 433, 434, 435, 436, 437, 438, 465, 478,479, 482: n = A,T,C or G
gccccagcggatggaactcataaataaagagtgagaaatgcaanttatgccagangttagaaagccaggctccttgccacagcaagaaggggatagctgcagcccacggagaaggagaaccagtaaagttagcaaaagcaggcagaagaagtttctaaagcaacatactctgcaaagcagtctgggccatgtactgtaggagcaagttgccagcagcccccgggagcatgaatggatatagcaactgttgttgaaaaagaacaatcctgatcaacccacatcaaaggctaatagacctcatttaagaagacagggaaatgtaaatctgtgagatacttcaggatcatttctatcaaaaagcgtttcatataataaaggaataaagcctcagttatctggaagggtcnnnnnnnnnnnnnnnnnnnnnnnnnnnnnnnngggggccggggggggcccttttttttngttttaacccggnnttnttttttttaaagggggggggccccccca

SEQ ID NO: 1184 - DNA, 379 bp, Homo sapiens
gctcggtgactaggaagagtggctgaaaggccccacctctgactcctccctgcttctgatagcctgagtcctgggggacagagggaagcgcctctgggttcccctctccgtgtgaggcagacagcctccgcccaggctctgaggggccctaattcttcctaacagacagcagtttggagcttctcccagagtgacccaggagccagcccaggagtggtctagaatagacaaaggaccgttagtatcccgatgtgaattttagaatgtgtatatttcatacataaaaatagaaatgtatatgaatgtaatatagattatatatttattatgtatgtaaaaacagtatgtgcacatgataaatgagcatatctacgtctct

SEQ ID NO: 1185 - DNA, 317 bp, Homo sapiens
  misc_feature 250, 270, 271, 276, 278, 280: n = A,T,C or G
gacccacctgccatgctgtgaggacacccaggccacatagagagagtgaggccacatgtaggtgttacagccagaagccccactgaaaaccaaacctgcaaccagcatcaactgccaaacatgtactgaagaggctgagatgattccagcacttgtggatgactgcaaccacatgagagacccagagcaagagctacctagctgagcccagttactcccagaatcatgagagaactatgtaattgattgntattactatataagccactnngtttncntntgatatgttatgcagcagtagacagctggaacaggag

SEQ ID NO: 1186 - DNA, 378 bp, Homo sapiens
gtgcagtgaacaaccacgacaggcttcacatcatcctacctggtcagaagttgccaccattaggacaattaattaaattcaacagtaaagatgctgccatagttaatgaatcatgttttccctggagctttccacctattcaaaggacaagtttcagagcttggatgaggagcaactatcttatgaacacagagacatttgtcagttttaaaggtcaaattagatttttgctcaggttcccaccaaaatgatagacttgaaaatcaggatttatcaaactatgttctaaattatttcaacatatcgagtgtattagtctgttttcatgctgctgataaagacatacccgagactgggaataaaaggaggattaatttg

SEQ ID NO: 1187 - DNA, 688 bp, Homo sapiens
  misc_feature 3, 16, 20, 27, 32, 33, 48, 49, 50, 68, 71, 76, 77, 78, 81,89, 96, 98, 120, 153, 211, 240, 252, 341, 387, 388, 405,416, 456, 457, 466, 471, 477, 478, 504, 558, 592, 606, 616,625, 645, 648, 649, 659, 664, 668, 674: n = A,T,C or G
ggntcccctctgttgnccanggctggnaggcnnggggcgggaaccttnnntaactggaaccctgggcntcnggggnnnaancctaatcngcggtgncntcgggcctggccaaaggaagcnggggaattaacaggtccggcgccgtcacccaangccccggctaaaattattttggcaattttttttggtaagaagaacgggggggtttttngcgcattggtttggcccaagggcttgggncctacaaaaaantccctgggccctcaaaggccgaatcccaacccccggctttcgaaccctaacccaaaaggtggcttgggggaatttaaccaagggccggnggaagccccacccggccgccccggggcccaagcctgggaataagtnnctttaagtgaatcaaanatgaacctggngggggcctgggaaaccctcaaggggggaaggggggccctnnacccttctnggggnaaaacnnatcctggggatcctggacaagggggncctttggcttccattcaccccaaggcctcaaaagtggaaaggggggcaatgaancctccgggctcaacctggcccgccttggaccctnccctggaagcctcnaaaagggaancctccccancctcaagccctcaaaggaanaannctaagggacntgganggcnaagganaccaattgcccccc

SEQ ID NO: 1188 - DNA, 404 bp, Homo sapiens
  misc_feature 59: n = A,T,C or G
gtgactgcctaatgttaacaaagatctgtaggaatgatgggaaggggcactggtacttntctctttcctaatccttcaagtcatacctgaagatccgcagtttttctggagacaggtgaagtccagcccctgaaagacgcagacagtgcagagagaagagcctacgtttttatatttttgtcaaggtgatgtctcaagcaaaatgaagtggtttgtggctgaaacaacctccacgggaaagaaaactggagtgttcgttcatccatcaaagaacaaacgccaacgtctgagccaacgaccccagctcccccagacaaagcagtgaacagattaaaggatgggaggaaggatacaatcaaaatcgggtggtgatggctggcagataaaaatatggaacgcttcac

SEQ ID NO: 1189 - DNA, 552 bp, Homo sapiens
  misc_feature 14, 19, 36, 44, 50, 51, 52, 57, 73, 78, 127, 168, 183, 205,207, 214, 227, 229, 243, 250, 279, 293, 312, 314, 348, 355,363, 427, 428, 430, 450, 470, 488, 520, 521, 537: n = A,T,C or G
gcagaaggccccanaaggnccgcaagaactccccanaaaggccngcaatnnntccgncaagaagggcccggcngaacntcccgcaagaagggcccgcaagaactcccgcagaaagtccgccacacangcaaagggaaagatgcctcccgcgtccaagcccggcttganatgagcaggcccgangagccaatggcgcaaaagaagngncccggtntcccggatcgggnantcctcataactttncctttcnttctggaccaaggtaaagcccacaagagntatgggaaaaaagngcttggggggaaaggaaancnggtggccggaagttccttcttcccaaccaagggncccactnaatttatngggaggaaacccaaaaaggcgttttttccttaaaaaacctggaccgggggaccaaaatccgaanngnaacctggacccacttgcagnaccattgggacctttccccntaaacctttcaaaatctnggtgggaagaagaagggccctcaagaaggtcnntccactccgcctattntcaatttatcaaggg

SEQ ID NO: 1190 - DNA, 317 bp, Homo sapiens
acttgcaacttatgtttcccttttaatcacaaagctgaagaatagacaactatacgacctatcatgaagcaggaagaaaaaaaatcatcgacatttttgaccatgcaaatgagcattttttttctgcagaataaactaaggctaacaaaaaagacaaaaacaactgatcattcgtatgaaaacctaattatttggtggatttttcaaaaggtggtcagctaattatgtggtatcatctggaccaatgttttctaggcaagcctagatggtcaacttttgagagagtttataataaagtttgatttgtttatgcatac

SEQ ID NO: 1191 - DNA, 370 bp, Homo sapiens
tgctgcttttagaccagtcgcacaccaggccgaagaggtgagagggtgaggtgtttcccacaagaacatccacatcctcaggatggatggaggagcaaggacgagaacccccaacccccgagacagtttctggctccttccttccaagaagccctacacatgatatccacgttgaagccctcatgcaacaagctactcattcctcttctcaaaggaagtgctgagtgtctggcaagttggaaagaatgagggattcttctactgggttacctggtcagctccgaggagagttaaaccaggaaaagtagttcaggctggtatacctccctgtttgtccttgagggcaacttaaaagcactatttacacaag

SEQ ID NO: 1192 - DNA, 427 bp, Homo sapiens
  misc_feature 380, 381, 382, 384, 385, 386, 387, 389, 390, 391, 392, 393,396, 397, 398, 400, 405, 406, 407, 408, 409, 410, 411, 412: n = A,T,C or G
catgccatgtggacgtgacgcctggagatatcgcacccaccttataatcaggaggaagaatgccacgtgtggaggatggtgccacaggaatctggaagagctcgatcctggacgacttgctcaagcagctgcacattcctcctgccacctacttctggatattgtgttaggaaactggcatgagcatacacatccattcagaggaggtgaaagtggagtgactgatgctagaatccccaccttctgagtcaacggtccagagaacaaggccaaaacagccacaaatacttttcaggcttcaggatcaaattttttattcttgaatgatccaaacactttaagaaaaataaagtttctagaggaaatcaacaaaagtgggnnnannnnannnnnaannnanaaaannnnnnnnggggggcgggggggc

SEQ ID NO: 1193 - DNA, 453 bp, Homo sapiens
ctttggtgtctgcacagtcccacacgagccaagcccggcttgcagggtcaagctgtcttttcatagtgggaaaaagctgatgaaaatccttcacacagaggtgttaagagcttaatgatgaacactcccgacctgagttataatttcacaagaatttgaactttatttttctgcggagagtcacgtgatttgtcctgcgtgccaataaaactactgatgccagctggcctgaagaactccatgaagatctgactgactaaagaatgcagtttccaatcctggtgatttcatcccccttatcccaagcagtcaataacttctactttccagcctcttgtcctccacgatccccttaaagactctagcccaaaactccccagggagatggattcgaggattcctctgttcgctcactcagccactctgcaatcattaaactcttttctctgctgc

SEQ ID NO: 1194 - DNA, 453 bp, Homo sapiens
  misc_feature 37, 44, 47, 75, 310, 313, 337, 370, 372, 383, 387, 389, 411,414, 415, 428: n = A,T,C or G
tctgtgtcatgctgccttctgtagcaacaacggctgntccctgnttntgtgccacatgccaaactattcaacatntgcacatactctcctagtcactcttaagggtgtttcataatgaagaaactgaggccgtgaggactgaggggcaatgctgcagcaatgtcaagttcattcggtggaccacgtgccttccatctccaaagacacagtctgtgctccttaaatacctcctgacaaactcaatgtgcagaggcaagatagagcaagtttctgctgcaaactcaccaccagtagtggattctaagcccanctncctgccaatgattctttgcagggncacagcttctgtgcctgttcacctagggctggntnaccacaggganggancntgattggggaaaagcattggcngtnncagaatggaaaangggacctcaaaattttgtcttaggg

SEQ ID NO: 1195 - DNA, 473 bp, Homo sapiens
  misc_feature 342, 354, 359, 400: n = A,T,C or G
gcttttggcatctccattcattccggaacagccagtcagccctctctgctgtgtcccagagcaccaggaagtgagtaacagtcctagagtgagacatggaggatacagccaagtatcagaggagtgctggctcgctgctgcttctacacgtcaccgtactgggggaatcctatgtgaagccgccccatgtcctgtctgcctggatactcaccatgcagatagctctctgcattcagcagggtctggcttaggccctctcctgggggccggagacccctctgttcttctccagaccctgcagaattctggagaggagaggaaggtggaacacacactttcttnctgcttttctanggtgntggggcatctctcttcttcttttaactacgaacttcacagnccaaccactttctcttttttacaagccccttggggtccttcaagaaccaaagtaaaaaaaagctttaaaaatg

SEQ ID NO: 1196 - DNA, 127 bp, Homo sapiens
ccattgacctggatggacctaggacacacactaaaggacacatctggattcaccaaggagctttttatatctcacaaaatagcatgttgctaataagaagaataaaatgaaaccaaggtacaaaatg

SEQ ID NO: 1197 - DNA, 311 bp, Homo sapiens
  misc_feature 17, 18, 20, 31, 38, 40, 42, 44, 50, 56, 67, 71, 72, 73, 80,88, 108, 112, 127, 158, 173, 196, 242, 287: n = A,T,C or G
agaaagaaccttcaggnntngggaggtgggncttttcntncntnaaaacnatgatnccttgggtganccgnnnggattgncccacaanccccgatggaaacattcaanaggngaatgccttgctcanaaccccctggccaggcttaggagggaaaaantatgctttccaactntggcaagaaattgctgcatccanaggctgcagaagccccgaggagcatgaacatgctttggaagaatangcgctgccttgagtgacatcctgaaccagacccttacacacacanctttcattggtggcttttggggtt

SEQ ID NO: 1198 - DNA, 497 bp, Homo sapiens
  misc_feature 335, 378, 438, 476: n = A,T,C or G
caactgtggaagtcaaggccagaaatcactcactatatcatctgatattcctctgatcgttatacctattctcagtgttaaggaaatgagaccagttgaaacgtccacattaaaataagaagaaggagagaaggttttctaattgcagttaatgtcatcgttaaataaagaatgccataaaggaacgagatcagcagtgaccttctgcacagtttccaaagcctcgccaacctacctccgtgtcctggtctgacttatggcagaaacagaagttcaaagacctggctgatatgctccgttaaaaacccttccacaacgcagttaacattttctgntttctgactttctttttctaaagagatgcttaaagcaaaaaanggttcctgccccaaaaatgacattaatatttcgtaaatcaagaactaagataatggtttnggctgctacagagaccgttacccttatgcggttatctnaaagcttttcgattaaaacac

SEQ ID NO: 1199 - DNA, 350 bp, Homo sapiens
atctgaagagaagagaaacgtgagggaagaacaggcggtggcagccggaagagagtgggtggaacagtccctgcaactcttcagagaaaagaaaggggcgctggcccaggcccaagaagtgtccctgggggccgatgtcggcaggaatccccgcatctccacatgcggaactgagagaagtgcctggcagattcaatcatacagtgactcaaatgtcacagcatgactatagagaaagaataatagtggaagcatcccggccaattttcaacagaagggctcaggataaggaagcttaagaaaattgccgaagagaatgataatgacaataataaaaacaaatagcttcc

SEQ ID NO: 1200 - DNA, 275 bp, Homo sapiens
caggtgaataaggtgggatttgaaatcagcatggcagtgtccagtggaagaagggagctgaagtttcttgaggatgaatataaagctgggggagttatcattgagcctaactctctggtttggaacccataaaccctaatcaatatacctcccaagtttacaatagaggtgagtatattctaccttactccatttccatcccaacttccccactttgtaaactttcagaactgacttatggaggtttataacagccagatatcaaacccatagac

SEQ ID NO: 1201 - DNA, 354 bp, Homo sapiens
agaaagaggaaaggaccaggagtggcgaccggcaaaccacagcttgtgtgggaaggaaatttgacatgtgatgcaagcggaccgtttgtgtaaactgctgggagattaacaacaactgtgagtggaattgctgagtcatgtggcaaactaccagttctgttgaacctcagggccatcattctgttcatgtcagctcgttgtagaaccacatcgatgaagaccaagatggtaaagatgaaaaattgtagctaacatttactgcacatttactacaagccaagcattgcactatgaagtttaagtgcattattcattaaccccttcaataaaatttgtaattttcacttcagaagc

SEQ ID NO: 1202 - DNA, 310 bp, Homo sapiens
gttggctgattgtggaggctaaagcaactctaccttgccagcttatccaccatgtggacttctaattaatctcagttgccggaatgcctctaagatttctacgttatctactgtgaagagcaagtaattactgcaaatcctgcccttgggtcaaaacaaccttgatgacatattccttctgaagcacatatactctttccctaggtatataagccttgggtctgggggctaacggtgcagggatccatcatctcacagccacccaagacatggcttttgttcaaaaatccctattaaatgtttcattctg

SEQ ID NO: 1203 - DNA, 446 bp, Homo sapiens
  misc_feature 422: n = A,T,C or G
gtggttacaactgtggccggccactgtcctaacaagtcagaagagagattctttgccaaaatcttcaggggaaacgacacgagtaccctttgcttttcctcaacgaacttcccttctacttagggttttagggcatttgtacaaatgatttgttccttgggtctgaatcttggggatgtttatcattttcgttgctttcagaaaatagtctgcatttccttctattacctggaccattttcctggctttttaaaaaaaaattattattcaaatggaaaagcggcgagcccagaatgagccgacgaattgagctcttccttctctcgaacacgggggcacctctacccgctacagacttgaagattttactcacttcctttcatcccctcgctcgggtttggagggtaggggcatgaagtggntgaatctaaactggcagaaaaccc

SEQ ID NO: 1204 - DNA, 88 bp, Homo sapiens
gttcatatcatggatcccattttatagatgggaacactgaggcctgagtttacacgagaatttgctgaagaggagaaggaaaaaaaaa

SEQ ID NO: 1205 - DNA, 211 bp, Homo sapiens
  misc_feature 22, 37, 65, 76, 136, 149, 163: n = A,T,C or G
ggctttttcactcattccctangcatgtgggacctcnaagatgccgaatcagctaaacgggaggnggcttgagtangatttgctgccagctaaagcgtgagatgctattgcatgtgcaaggcaaggctttcttcancggcatcatcttncaaaatagcccagngagcatgcctttctcctgaaaaataaaaaatagttggtgtttactgcg

SEQ ID NO: 1206 - DNA, 245 bp, Homo sapiens
agttccccaaggacagaggtcagggaataagagctgagtgagacctcccaaagcagatcacaaagagaaggggacactgcaccatggaggtgacacaggccagtggccacggtgctggacctggggctgagaggacccacatgtatatcctggccgatttaggtatcttagactttctgtgcctcactttccttatctgtgaaatcagcattctgatcatgactaaataaaaattgctgccattg

SEQ ID NO: 1207 - DNA, 325 bp, Homo sapiens
  misc_feature 230: n = A,T,C or G
gggtatcctcaccttgtataatcctggaatcacacttctctccgcgtacatgctggcagagctcattctctccacttgggaaggaggctacaacttacagtgtcaagatcttaccagcgcaggggaagctgacatccggaggaccaactgaataaaccacagcacatccacgtagcggatgcctctaccaagtggagtgaggaagagctctataccgctacagaattgtntctgggatatagttacatgaacaaaagcaacttgcagaccgtgtttataggatagcaccctttgtgcaataaatgatatgaatgcaaaaaaaaaa

SEQ ID NO: 1208 - DNA, 232 bp, Homo sapiens
aactgtctactggctgcagataagagaatctctttatgggggaactgaaaacagaagaaaaatcaagggataatggcatttgagggttcctcaatgaccgcccagccacatcacaccggagtggagccccaacctgagaggctcttacccagagcttccagtcggcatttcagtggatcacttttaaaaataaatggtgatggggtgatggaaatgctacccccaaaatacg

SEQ ID NO: 1209 - DNA, 159 bp, Homo sapiens
ccttgaatatgagcatgctgcatgctgcagcagtatatagtgatcaaaggcaacaagccaaggatgatggaagaacaagagagaagcaggctggttctttgacattggacagccagagtcccagccctggatggcctgttccagacatcttgtcaagtg

SEQ ID NO: 1210 - DNA, 329 bp, Homo sapiens
  misc_feature 315: n = A,T,C or G
gggtgcgatttactggtgatgagctctgggaccttcaatactaccagaagattgaggacatatcaggggagacctgttgcctcacttttgtcccaatgtatgacctgtttccacagagaaacatgcaggagaaattgcacagatagaagaactgaattaacaatctccaagactgctgagtggttttgatctgccttgcttactttttcagccgctttatatgctgaaatgtttccagtgcaaccagaagtttcaagtgtaaaattctgtctttcctcttctgttattttaagcttttaagacaccatacataanagcaaataaatgac

SEQ ID NO: 1211 - DNA, 133 bp, Homo sapiens
  misc_feature 19, 26, 63, 64, 65, 70, 80, 86, 110: n = A,T,C or G
agatggggttttgccttgntacccangctggataactactcttgatgacataaaatctactgnnngcagnaaagacaganagcatncaccctaataccttagttatgaanactacagaatcagtagaagaaca

SEQ ID NO: 1212 - DNA, 270 bp, Homo sapiens
gttctgcatgctgataaaatgatcaacacctgctggtctgaagggctcagcaagaaactgactcatgggagaatgcactttccatattctaatgacttcatcccccttaccctgaccaaacgataaccccaattttctaaccccttgccctctccaatcccctgaaagatccttgcccagaacccctcaatgaaatgaatttgagtctcgagaattcctcctgtttcctcattcagtcatcttgcaattattaaacaacttgtctgctgc

SEQ ID NO: 1213 - DNA, 355 bp, Homo sapiens
  misc_feature 32, 53, 170, 174, 181, 185, 190, 201, 203, 204, 210, 211,213, 221, 229, 230, 237, 239, 240, 266, 271, 274, 283, 292,295, 296: n = A,T,C or G
gtggagagaacagcatgtgtgaaggcccaganccggcccccggatcttttcanaatgcatcttggtcaggggaggatggtcggccaggacacatgcatggccccctggagtcgtgcagctgctggccttggtgggacttgctcagggactcactgctggccttggggagnacanaactcanggcnttgtnattccgaagancnnggtctnncncctgcaantgccgttnncagaatngnncccaccccaggaggatcacccatatncaacnccnggagcagcntcagccacnctnnaaacaagggggaaacgccaagcccattacattaggacttttccctgccatcactgggct

SEQ ID NO: 1214 - DNA, 397 bp, Homo sapiens
  misc_feature 338, 340, 342, 344, 350, 353, 356, 358, 372, 373, 383: n = A,T,C or G
ctgcttggtgctgcggtgtgccctatcctggctgcatttcttcattccctcccctgcccacatacatccacagccccagtcggctgtatccatgaagagctgaatggaacaggatgactggcagcccacgccaagggccaagagatgtgaaggtagaagcaagaagttagaatgacctgaggaagaggtcacaagcccaggaatgccagcagccactaaaagctgaaaaaaggcaaggaaatgagttttcctctgaagctgccagaaggaacaagcccagccaatgccttgaccctagcccagtaaaattgattttgaacttccaaaaaaaaaaaggncngngnggccanttnagntnggacttaaccaggnngaacttgttnaaaagggggggggc

SEQ ID NO: 1215 - DNA, 141 bp, Homo sapiens
gtgttgagtgggtccctttggctggctgctctatgaatgctgtccttcgtgcataagaactagtctaagctcccaaagaactggatgctaatccctgtcctgatactaactcaccctgggacattaaacaggtcaaaaaac

SEQ ID NO: 1216 - DNA, 96 bp, Homo sapiens
ttcctcctcctgccatggtttgactgagctgaacaaaccggaaacttctctaggaaccgggctatactatacatgtaattaaaagttaattatctt

SEQ ID NO: 1217 - DNA, 305 bp, Homo sapiens
aaagaaaaactacatggaatgaggaaatagaccactcctgccttcaaaatcctcttcgtgaggtttatagaattcctaagaactcaggaaagacatcagcagagagcaatgatcgtcatagccagctccacacagaatgcacccacccagctacttgtcgaattacaacctgatgatggatccaccagaaactaagaatggaaaggttataaagaaatcacagcattcatcttctggaagaaaaagactatttcttagaaagtaaaataaatgaataaaagcacttaataaggagcataacgcgc

SEQ ID NO: 1218 - DNA, 427 bp, Homo sapiens
  misc_feature 364, 371, 386, 404: n = A,T,C or G
ctttctctaaggaagtgacatataagctgagcctgaaagatgaagaggagcagattgtatgcagagcagagggaagagcaagctgatggaggtgactaatcagagggcctgatggtcaagtgctcaaggtggagttaaaggaaaccctgctttcttgacatcaccagctgctcagaagccttcagcaggcatcctagaccttctccttctctaagggatgggcctcacctactttcttcagctgagacctggcacagacccttggagcttctaaggaccccattgtagccttggggtggaggcccatggcaccactgccctctccctgggataaaggtcctggggccacttctcaaggctgggnccctttnttaagaaggaaatgntttttcccaaataacctnctcttcttcctttttcttcaccc

SEQ ID NO: 1219 - DNA, 438 bp, Homo sapiens
gacgtgataacgagtcatactgcggtggatcggcatgcaccctgtcccccttcttacctcccagaattacctcagtatcatagcgtaggtgctttggagaaaactgactcctcctagcaataagtcttcagttgctttaagctttaagcacattctttcagtcctctgatcactgtcatttgtccaggggtgggcatggactttagtggtaccaaaaaaaatctcgcattcctatttgaaatgctgagacagaagtacaggctctcactttctctgcagttggcagagagggaatgtgggctcgattgcttctggcaaacattgtgcaagtcatgttgggaaaggggacttgaaatgaagcgaagattccagaaaacagaacaaaccaaaagaaatggtgaccactataactggcaactgtggagcctgccctatctt

SEQ ID NO: 1220 - DNA, 424 bp, Homo sapiens
  misc_feature 389, 398: n = A,T,C or G
gaacactatgaaaagattgcaaaaccaaatcatgagaaggttagattcctactgaaatgaaagatattcatggtatttggaaactcttataagcaagaagtccgaaaagttcaagatacttctgtagaatggtttaatttaaaaagtggctgctatcctggatggggttaagaagctgctggtactctgctctggatctccttcttccctgttgttctcctcccaacaaataactctcatcttcaagtctaccaaaagcggctgaccttagtagcataacctctaaaccaaactcaactcttaccttctccataaagctgccagaaattgctcctgccgagagtaatttacctcttacacaccactgttatttcactgtgtgggactgnattcccaantaaattgagaatgtctaatagatttt

SEQ ID NO: 1221 - DNA, 318 bp, Homo sapiens
taaccggatctcctcgaattccgcgcgcacgaagactcaggggagggggccgagtggacttcaccccgcatgagacgtctggcaaaataagaaggctctcgcaaaacctaacaaccaaatatgcaaagccccaaatgacaaccaccacctcctcgaacctcagaggtctgggggcgtccggctggaactggggtttaaaaaaagaaaatgtttacaaagtataacaagatgtttgatgggtggaaaaatgtatccacgagttacatccccccgtttccttgcaaagccccgctggtcttcctctccttttcttctgcc

SEQ ID NO: 1222 - DNA, 227 bp, Homo sapiens
ccttcagacttggcctgaaacattggtcctccttgggttgtgagcctgcaggtcctcagactgaaactatccatcagctctcctggttctcaggctcctggattcaagctggaagtacacatcaggtctcctgggtcctcagcttgatgactcgagatcttgggaattctcggcctctataactgtgtgccccaattccctataataaatctttgtctttctctccc

SEQ ID NO: 1223 - DNA, 462 bp, Homo sapiens
  misc_feature 234, 445: n = A,T,C or G
gtcgaaatccttccccgctgatataaatatttgagttggggagcagagcttcagggaccatgaagaaaatgctgctctggggacactaattgaactttcatctagcaggtcctgtgccctacctactcaagaacaagttctgtttgatgaagaagttacacagctgccaagttccctcattctactacctatctacccccaaattcaggaatgtctccatatgttgactatgcngactttttcagtgtcctagtggaaccacagcttaaaaaatgggaaatggaggcagtcccatatggcagagtctccgatgtggaattaggcatcgttctccaaaagccagcctgcagccctttggagagcttactaaactataaattgtcaactgtattacatgataaagcagatgtgtccatacagtaactcttttgctaataaatgaggnctaaattccaaaaatag

SEQ ID NO: 1224 - DNA, 465 bp, Homo sapiens
  misc_feature 411, 423, 430, 443: n = A,T,C or G
tgttaaattctcctgagtgaatcacaagtccaaggtggctgaatgcacttgccagtctattgctattgaagcaccttaatgacataaagaagaagaaaccaatgaacattgttatatatttcattttaaactgatgtagacattttgaggaaatctgcattttgaaccaggttaactgtggaatgcccttggccaagaggaggggtccatttgatgattggatggccttagaatttatttttggttaatagtgccacacagctaaatccaagagagtgtcttagaaaataaactctggaaacatatttgagaaactaataagaatgattaactgtagagggaagtgtcaggcctctgagcccaagccaagccatcgcatcccctgtgacctgcactatatgcccggatggnctgaacttactnaagaatncccaaaagaaagnggatttttgcccttgccccccc

SEQ ID NO: 1225 - DNA, 184 bp, Homo sapiens
accattagaatgtgacctctgtgaagacaacagaaatggaggaggcgatccatgggcatcttctgaagctgttttggttaactttgatttggaagtcctggttccaggttctcctgtttcctgggaccagctccagaagttcattattttcataaataataaatgaatgcatactagggactgg

SEQ ID NO: 1226 - DNA, 124 bp, Homo sapiens
  misc_feature 36, 53, 62, 66: n = A,T,C or G
tcttaaccttttgagctccgttcagcctggttaagnccaagctgaattggccnattcctttngccnttttaccctggaagaaatactcataagccacctttgttatttacccccaatcttcaca

SEQ ID NO: 1227 - DNA, 374 bp, Homo sapiens
atgaagatcattgagattagagaagaaaatgggatctggccaaggacatacaactaagaaatggcggtgccacagatggagaaactgacactcagacaggccaactgatctgcccacatcaacgagctaaaaaaatggcaaggccaggatttggccctaggcctgcttaactctgaagaccatgtgcccagtctcctgccaggccatttacatcctcaggaggattgctgcagccccaggacaggcgattgccttttaccaccctcctgccagaccacactgctgctgtccctgctcctgtaccccacttttgctgggttgaaaagggtgaaaggggtaccccactgcttgttgtaccccaccccaaattttgc

SEQ ID NO: 1228 - DNA, 318 bp, Homo sapiens
atgcaatgaaattaacctctccttccaagaacagcatgcaggcagctagctggaaagactcacacttgagtgaatagcgacagctcgccccttctgcgctttgacgctgctgtctctactggccacttggtctaccagtcagttgtgccctgtatgtacccagccatggctgggaagactcacaaccacaagattgcctatcagtaggaaatacaggaaattacaggatgggtatatgagacatatgtggtggatataaagctcaatagtagtgatacaagtgtcatattcagaaaataatataaactttcttgctat

SEQ ID NO: 1229 - DNA, 502 bp, Homo sapiens
  misc_feature 385, 387, 422, 426, 443, 448, 464, 474: n = A,T,C or G
gcccagaggggactgtggacttggtgccagaaaagaaaatgaaaagcaaaagttgaatctctgcggaccattctctggatgctgaatgtcccactattacatctcggcatgacatttcatggccagcaggggaggaggcccagtcctgaaagctgaacaaacgcccggcacacaggcctgcctgcgccctcgtagtctctctggacttatgaataaaagatggaggttttgtctctgttgtttccctggtaccctgtaagaataacaacttgttgctttttgacattttaacttactttgaaaaatgaccaatattaactttacatgtcttggcccttaaatctggagtggggtaaaatgaaagaaacaaaagccatgtaattangnagaagataataattcaaggtaaactaatgaactgnctgnaccgactttattaaaanatggngggacatgccatcccnaactaaaagnttaaacctgacttggaggaaccttgggc

SEQ ID NO: 1230 - DNA, 228 bp, Homo sapiens
  misc_feature 9, 18, 41, 54, 82, 87, 88, 116, 120, 124, 128, 131, 175: n = A,T,C or G
gagacactncggaaggcncagaagatagaacacagagggcnaggccatgtgaanacagatactgaaattggagtgatgcagncacannccaaggaatgcctggagccaccaaaagntggnagangcanganatagactctcttctatagcctgtggagctctggtaataccttgnttttggatttctgccctccagaaccatgacagaataaagttctgtcttaagcc

SEQ ID NO: 1231 - DNA, 395 bp, Homo sapiens
  misc_feature 8: n = A,T,C or G
ctccttcntcaaaaagtggaatccaagttgtctacccttcacaactgaactggctacatgacttgctttgttcgaactggctgcatgacttgctttgttcaaccaaatgctgcagaagtgacggtgcaacacttccaaacttaagaggctttgcatgcttccatccctgctcttgattttgagccacccctgtcacaccagtcaataagctggctagctgaaaaacgtataagtgagcctgtgccaggccagccagtgttagctgacttttcacctaactgcagacacatgtgcaaacccaacccaaataagccaagcctgacccagctcaacagaactatcaggtgacctatagacatacgaacaataataataaaacaaaacctaagccactc

SEQ ID NO: 1232 - DNA, 178 bp, Homo sapiens
  misc_feature 136: n = A,T,C or G
gtttcccaaaggatccaaaaaactgagagggaagagatttggggaagatgtcacttttcctcatctgactttgccttggagtcagatgggagaatgactcctggagaacacttagccttttccagctttccccaanaaaggctggcccagggaggcttctataaaccttctccctatg

SEQ ID NO: 1233 - DNA, 299 bp, Homo sapiens
  misc_feature 68, 78, 124, 181, 191, 197: n = A,T,C or G
ctcaccagagacctcaaatccttacctggaggtcaaaaaacttgctgtagcgccggtaaatggcctcngtggagccgntggaccacgtgacccggatgatgtacacctgcgggagcaacaaaangagatgggtgttaacaccagaaggtggtctcccaatctctgggacccagggggagcncaagactcanagtcanaaagacgtgggtttcaaccttagctctgccaatgactggctggacaagttgcttgctgtaagcctcatctccctcctcaataaaatgagtgtaataaccccc

SEQ ID NO: 1234 - DNA, 137 bp, Homo sapiens
  misc_feature 2, 11, 16, 29, 33, 50, 110: n = A,T,C or G
gngaggatgcnaaganaaaaggtggctgnctgnaaccagggagggagaanccttcccagggaccaatctagcttgaacttttgactttggacttcaacctccagtattgnaaagaaataaatatgttttcaaaagtc

SEQ ID NO: 1235 - DNA, 216 bp, Homo sapiens
agatatggtctcactatgttcaagtctaagactcaaactccaggactcaaaccatcctcccacctcattctctcaagtagctgagactacagggatcgaaagatgaagaactcttgttgaagctcataactccctaattacttattattaacagtgaaaatctgattttcaaagttgtttaatggtcatgcaataaagcaatgtaagacgactgcc

SEQ ID NO: 1236 - DNA, 281 bp, Homo sapiens
gtctttggacccagattggaactataccattggctctcctgggtttcaagcttgcttgctgactgcagatcttgggacttctcagcctccataattatgggtgagaagcaggagctcagagaaggtaaaagcatcaaaatcaccacagcaacaaagatttctcaggaaattataaatgctgagaacagtcttgttttccttgcgttggcaggtgactcactgcatagatatgatcatcttcagagcctcattataggtttagcaattacattttaaaaatt

SEQ ID NO: 1237 - DNA, 491 bp, Homo sapiens
  misc_feature 393, 422, 445, 455, 467, 468: n = A,T,C or G
cttgctagaagagcactggagatagagtcggatacgctttaaaggacaagggaaaacagctcccagtggatggtacacacatggcaaaaggccaagagtagaagcaccgtcattaggaaaaggaatcagccaaggtcccaggcaagaagaggtgaggcaaatggaggctctgaggaaagtggctccaaagcctacatgatggaagataactctggaagagaaagagatgaccgttcctaagcttgtatagcaaaacttgagagaaggtaacgaagatgtgacatctgaactcagagaaatataacttctatagaaaagaaacaaggccttgcagctctataaggaacagtaaataaatcaagtatgcacacaagaagtaaaaaaatatatccnagtagaaaggaagcttttcattgaaatgnccccagaactcatgctcttgganggccgggatngcaaaatcaagnntttttttaaaaactcctacccgg

SEQ ID NO: 1238 - DNA, 199 bp, Homo sapiens
aggataaaaaagaagtaagaaaatagagtctctgaatatagatctttcaactgaaaaactgggctgtgaagcttttggactcgaagtacagcctttcctgagtctccagcgcactggcctccccccatcagattttggactctccaagcttccacaagcacaggagccaattccttaaaataaatctgtttctatatcc

SEQ ID NO: 1239 - DNA, 282 bp, Homo sapiens
cccccaaggactgggatcaatattggaaacctgtgctttagttcttccacctctgctgctgctatgctgtgtgacctcaggactgggccgactgggagcaccatgtggagaacagagacaaactggagtgccttggggaggaaggaggagagcacagtctctgagtcagccatgaggcagagcaaatacaagtggtcatgcaggaagaagagtgctggttctgcggggtcctaagagggagatgtacggggggtgtgctttgttcaatatgacaacactacc

SEQ ID NO: 1240 - DNA, 206 bp, Homo sapiens
attgagcacctgagagtctcaagtaacacacctggtttggctgctttgctgaagacactccgtacattgtgacttgttgctctcaccatcaacaggaattgggctgtgcaagcaattctgaaagaagtgttgtctactgctgtgaaagtcatcaactttatcagaccccagtcctgaccccagccttttcaagaaattttgtctag

SEQ ID NO: 1241 - DNA, 472 bp, Homo sapiens
  misc_feature 16, 407, 414, 415, 426, 453: n = A,T,C or G
cacttggcactgtacnaaacaccttcatatataccctgtcaccctgactgagcaggatcgctcagttccattttacaggatgaggtgaagacttttcaaagccagagctctaccctgatagcacaccgtcaggatgttcaggaagagcctcatgggttattacagctcaggatgcatccagacactgtctccatggcctgcggagctgctctctgaggactcacttcactgcccctcatttcccaggctcatggagatatactacctgtcacctctgggcctggagggcagatggaggtaagatgcaaaggaagactgcgtcgtcaaagcagatggaagcattccctaacacctgggccatcctgggtcctaacttaattactaaagaataagggagatttcaaagnaaaatgnncagacatttgnttatttgaacataaaactgggggcccnccaccagtattttggtaac

SEQ ID NO: 1242 - DNA, 283 bp, Homo sapiens
  misc_feature 12: n = A,T,C or G
ccttgcaaatangtgatttcctgccagtccctgcctctgtgaccaaccttgattgttcaaagtatagctctgcaagcagtggctacggacagtttccaacatgcaagttcatctccgaccccacttcatcattcctcctgcccccagcactcctggatgctatgctgaattgttttggtacctttggtttgtgagccttcttaaacctttctttcttctactttattattatcattgtattataaaagcaatagatgctcattactttaaaaaatgtaaaagc

SEQ ID NO: 1243 - DNA, 193 bp, Homo sapiens
gcactgtcttcataagtccacaggtctcaaactccagcatctcagaatgaaaggattcacaagtgctcacaagaggcttggctgccaggggaagctccgacctgaagatttgaactaatgagggactataaaggccaagaccttgttcttgccattttagagattcagaatataatctacaaagttagagatt

SEQ ID NO: 1244 - DNA, 501 bp, Homo sapiens
  misc_feature 14, 324, 325, 326, 332, 334, 343, 344, 347, 349, 351, 352,356, 357, 358, 361, 362, 364, 365, 367, 368, 373, 375, 376,384, 389, 393, 396, 406, 413, 433, 440, 444, 463, 468, 475,484: n = A,T,C or G
cctgcagaggtcanggagagagcccgatggcggtcttaatgaagaggaaggaggaaaggacgcagctttttttaccccccggcttaatttactccgtattcggcttaacttactccctattctaccctccggtcttcaagttcccttaagctcgttggcctgttacccagtaaaactacaaggaaatggtctgtgtggtgaattttgaagctgtccacagtacagatactccagtgtctgcccttccagaaaagagctggacctaaggggtcctcctgtctcacgtgcagactcccagggcgggattaaaaaggcaaaaatccnnngtttcntngcaaatccnnggnantnngggnnnganntnntnntgccncnntttggganggaangaancanaattaatttnggggctntaaagggtttatttataaangggcttngggnttctattttattggggaanaaatnccggganttaaaaatntaaagacccccttccaa

SEQ ID NO: 1245 - DNA, 327 bp, Homo sapiens
gttcttcctaacaagaagctacgaagttcttattcagaaaaacggaacacgacatcacacccacgtgaaaaaaacgcttttaagaggccaagtcactttcacctcccaccaacttgccaaaggctgaaagcaggcggacacgcccccaagcgctcttctccgatttcattggttgccccggcctgctcctcattaggtctctctcactggtcagcaatgccgctttcacagccaattctcagaaccaatcatctccaactattgccccgcctctccaccacgtgagtggcataggtgccaaccaataaaaaaagaaaataaggatgt

SEQ ID NO: 1246 - DNA, 100 bp, Homo sapiens
  misc_feature 4, 9, 13, 15, 34, 41, 48, 53: n = A,T,C or G
gcangggcntccngnggttcaagggtacaataanctgcgancgtgccnctganttctacctgggatgacagagtgggaccctgtgccacaaagagagacc

SEQ ID NO: 1247 - DNA, 505 bp, Homo sapiens
  misc_feature 386, 389, 391, 399, 419, 437, 442, 457, 466, 474, 475, 481,488: n = A,T,C or G
aaggctgtctcctgcgaggaccagaagttgagccaaggcacgtggaacttacaatagcagatggtaagaaccagggcagaaggagaactcctgaagcctccgaaggaaggaaatcattacagggccctacagaagtaggtcatgtgctacagctgctcatagtttaagaggaagaaacatgggatctcaaacctggaacacgactctttcaaaatgcctgtgagcaacccaagaaaaacatcctcctgaggcttatctaataaccatgatctctaatcgtctcaatgtgtgctcatgtttccttaagaagtttgcacccacttctcagagctaacgagatgccgaaacagaacacagaaaaaagtaatgaaggagatttaataagntgngntaaagctnatatgggccattaaggggcnggctttttttaaaacaanggggnggaaccgttcccctnttttttggnggaaaagnnttttcnggggcanggacctggaaaccattc

SEQ ID NO: 1248 - DNA, 139 bp, Homo sapiens
ataaaatctcctggcagagaaaatggacagtcgttccataccatatgtcttctcagcttcaaaatcaacaacaacaacaacaacaaaaaaccccaaaacttccatcatctgcagaagtcaaataaaactttcaaacttg

SEQ ID NO: 1249 - DNA, 261 bp, Homo sapiens
  misc_feature 48: n = A,T,C or G
ttgtaaattatgctcatgaaaagagaccccagcatctttcaaactganggttaaccttattatcaggataatcaccaattcacaggaagttgcaaggatggtatggagagcttccatttattcctcggttttccccaatgattacacctcacataactgtacctcaggaaactgaagctggtacagtgtgtgtgtatagttccatgccatttcgtcttaagtgtagatctccaatcaaataaagaaatatcctgtcaccac

SEQ ID NO: 1250 - DNA, 241 bp, Homo sapiens
gtggggtctttcagtatgtacaaacatacatgattcaggataaaagatggatcgtacccgttctcaccacagaaaagtaaccggagactcttctaagaaatcgagaaaagaacgccctttctcctgccctcctgtctaaagcgcaacataataatcgaatctcccaagcttcttagggtgctgagtgttttaatccaccagccctcttcaactagttaataaatcctttccagaccgagag

SEQ ID NO: 1251 - DNA, 505 bp, Homo sapiens
  misc_feature 2, 5, 9, 13, 14, 21, 30, 44, 63, 392, 411, 420, 450, 461,481, 484: n = A,T,C or G
gnaanctgntagnncatgccngacaccttntctccatgcctgcnctttctgttccaagccatntggtggaagcaatccaattgcctgcagaatcatccgaaagcatcactgggaagaagctggtggaactaagaagcaattctttagcctgacagccagtctgtttttagtatttctaaacatgaaatcatctcaggagaagccaagggctgtcgaggtgatttgcctgaggtcctacaactcatcactgactgtgtttggaggaaggaagtaattaactataaatgtgattataagggtggggccttaatctgataggaccagtgtccttataagaacaggaagtgtgtgccgttcactgaggaaaagccatgcaagaacacaaagaaaangcggctgtcttgcaacctngaagaaaanctttgcctaaaactaatcctgccgggcatnttaatcttggnaattccagcctccaaacagnganaaataaaggctggtggttatg

SEQ ID NO: 1252 - DNA, 90 bp, Homo sapiens
agaaacaaatacatcaacggagacaactttggaaacaatggaaacaaagaaccaaaaatgggcctgcacataaataaaaactccatatac

SEQ ID NO: 1253 - DNA, 589 bp, Homo sapiens
  misc_feature 25, 58, 68, 86, 132, 133, 220, 260, 270, 313, 314, 318, 335,344, 345, 383, 467, 486, 514, 517, 520, 548, 549, 551, 562,576: n = A,T,C or G
aagaagggggtttccgccatggttngcccaggctggtctcaagctcctgaactcaagngatcttcccncctaagcctcccaaaagngctggggattacaggcatgagccacgactcccagcctgaaatatannattttaatcttcagcttgcattttgttctaaacaacttgttttcaaataagaaccgggcagaaccaagtttaagccaccatttgttnggaggccagaatcaattttattgggtggtggttcaaaatngggaactggnactaagccttccttcttcccctccatccttcctagcccattgnngcangggggaaatttttctcnttttttggnngggggtaaaacaacttctttccctcattctgggaattngcccttcaacctaattgttggacaaaccgaaaaaaatttcaaaggccccccaaaaaataagcaaggcaaggcttaccattaatnccttttggcatggaacaangggggaaaatttttttttggccttaaanggnttngggggcctagccaccttgaaaaaacaannanggcccgggttnacctttccgaatcntggggggcttcca

SEQ ID NO: 1254 - DNA, 498 bp, Homo sapiens
  misc_feature 24, 45, 65, 68, 70, 75, 87, 90, 92, 94, 102, 139, 145, 146,156, 165, 172, 178, 195, 203, 213, 215, 225, 226, 229, 236,277, 300, 317, 325, 331, 342, 346, 394, 407, 410, 433, 445,448, 456, 469, 480: n = A,T,C or G
gttccaggccatcaagctacaaanggacttaccaatggtgccttnaaaagagctcaacgtgcggnttntnttggngacatcacgggnccnananaaaatggnttaatttatgtaacaaatcccctctggaggacaccanaactgnngggccccttntttgccctnatccgcngaaagnagcccgaatgaccactncccaggtnccaacagcanangggggggccnntcnaaaaacnaggactgagaggagggaccccccggctttctgggtcctgcnggggctcacaaaagttgtgaaantcatttattttcttgcntcaagacnttcttntgtgctggggngaanaaaaattgaaacatatgctttaaaaaattctaacaaccacggagttgngcattgtgttttnttnccccaagaaaagcttttaacagnggaaaaatttgnttntaagcttncctgggggctctnttcctggggtncctttccttttccctgaa

SEQ ID NO: 1255 - DNA, 303 bp, Homo sapiens
ggccttcatggaaactgctctggtgtcacagaaatatatccaaggatggagtgtgtacgtgtacaagctcgtctgaaaagagttggcttgcaaatgggagaagctgtccaagaagtattctcacaatgaaataatcattttattttgtccataccgacaaacaaccagtcaattcagctggaggaaaaaacaaacaaacaaacaaacattttattttccaaatttgtaatgagttcgcttaattatttttggtttattgtgttatctacatagttgaatcttaaatctgaattttcataaccg

SEQ ID NO: 1256 - DNA, 441 bp, Homo sapiens
  misc_feature 63, 367, 398: n = A,T,C or G
caggatggcctagatttccttacggcatcgaggacgagatccaagacagcaaaagcagactcngccaagcctcttaatggcaaggccctgaagcagcagagcttcacttctgccacctcctattggttaaagcctgtcacaaagcctgtcgagattcagaaaaagagagatagaacccacctcctgatagaaaaaagctgcacatgcataaagaaaggagaggatttgacagctatctttgaagagtatctgccccattaagccatgggatattttccccataaaagaaaggactatgatctggattgtagaaactgatctatagacatgaatctgaacttaagagaatttgactaattccatctgntcaaactggcatcactcacacatatttctgnaaggattcactcttccatgggtagcctcaataagaattcatgg

SEQ ID NO: 1257 - DNA, 431 bp, Homo sapiens
  misc_feature 16, 30, 33, 36, 42, 47, 58, 98, 99, 103, 115, 122, 123, 125,128, 129, 134, 150, 165, 168, 188, 208, 246, 252, 277, 327,332, 356, 362, 364, 382, 389, 398: n = A,T,C or G
aaaaatcctgcctccngtgctcctgagtcnctnctntgcctncaggngggtcctggcncaaagggggggtggcataccagcttaaagaactgtgttcnnttgnctgcaaccctgnagtacanngnatnngaagncccatgctgctctganggcgtcggaatatgngancgatccttgcctcctactanactctggtgcagggctgcanatccacaaagcccaagctgcagcaagtccgaaggcgcnccgcanggggagttccttctcaggagactgnggctttgctcttacggccttcgacagaatggatgaagccccccccccctntgganggtaacccgctgcattcaaaggcnaccgantnaactattaatcctatctnaaaaacnggcttccanaaacaaccacacttgtgtttgaacaaaaactgg

SEQ ID NO: 1258 - DNA, 332 bp, Homo sapiens
  misc_feature 7, 9, 217: n = A,T,C or G
gagcctntntccctggcaaatgggcttcactgttcatcacagaaacctcctgaaggacccatctactcttcaatcaacagctggtgccctacgattctctgaatcccttgcctggcctcaaaatccctcacctcatggcttccaccagtcctggactactgtgttccttacacaaccctaaccaagcccccacattgacacacccaccttaaagagnactgctaggcttcagaaaacccaaccttgcctccttcctcccagacaggccaaagccctctggaatcagcgccctcccttcggcaagtgagtaataaactcagctttgccttacc

SEQ ID NO: 1259 - DNA, 309 bp, Homo sapiens
gtgccaatatcggtcagagaacaggatttcagtggcagagttgttgctatactgttatctcttcagaacggaggcacaaggagagatgaatgccacatcgcaaggagcaaaggagagagagagaaagaaatggtgtcaggtggcatgttggatgtgatttttgttttagtagagattgagatgactgtaaattgtttagctgattccttcggtctgcaaagatacatttgtgttggtgctgatggttcttgactaatcctgtttcaattacaaattggttatgtttttcaaataaaacttctggcactt

SEQ ID NO: 1260 - DNA, 427 bp, Homo sapiens
  misc_feature 87, 165, 171, 187, 189, 203, 211, 212, 237, 240, 241, 292,312, 357, 372, 378, 392, 398, 404, 412: n = A,T,C or G
gctttggaaggagtttaaaccttaagcttaccctttcaatcatccactaccccagggacagaaggtggggaaaactcaaaggcacangcttgtactgagaagttttgagcaatggagaagaaagtgggagcttctgactgaccttagcccaccacagtcaggctncaagangggagatggcctgggntnatggctgcctttcntctggtgnnccttaccttttgggaaaacccccanggnnagaaaagtcttcaagtcttgtcagactgggaagtccccaactcccaacctnaggaagcagcccttggaaangagaaggatgagattttccaaagctatctcttaccactttccttnccccatctcattccntccatntattggggagaagncctctnaagttnggcctgangcttctgagggattg

SEQ ID NO: 1261 - DNA, 478 bp, Homo sapiens
  misc_feature 392, 427, 436, 440, 453, 455, 458: n = A,T,C or G
acatggaaactgaggaacagagagatcacatatcttgcacaaggtcctacagttggagagagaatgactatttcaacaatggcaaatagggttcatcatgtatgcacactctgattgctttgtggtggcttcctggatcactgggttgaaaaagacccaggctctgtaggaggtggttgattaatgatgtctgccattcagaacaaagatgtagcagcaggtgtacctcatttttgctgtctctggactattccattgaagcctttagttcctggattatccaattagccctagctttcctggcagtgtgatctccctctgccttaatatcagccctcagccctcgggattcttctctctgatatccacactcattgcctttgcttctctgngctccctaaaacaacgacttttcttccccaagccnaattggaantaantcctacctccagngnganactggccccggtcggcagcc

SEQ ID NO: 1262 - DNA, 412 bp, Homo sapiens
  misc_feature 397: n = A,T,C or G
gaaagtagccaaatcacctccctggctctggaagggtgtggaagtggtggagtaagagtcccagcccagataagggatcaccaccagaagatgaagaagatggtatgtccagagatccaaaggcaatgcgggcctcacagtagatgccagcacacagtggtgacaaacgcttggacaaaacccatcaatctcatgaacagcagagaggagaaacattgagtgaggatcagcagcctcctagagcactaggctcctgcatcagtctcctgcaacttagataccaccttgaggtcgggggtggtgacaggtttcattgtcaattgatgagtttgtttcaatctaaaaaaaattaggtggggcccagaatgaactaagatgatgtttttctgtcttggangggaccgggccttga

SEQ ID NO: 1263 - DNA, 389 bp, Homo sapiens
  misc_feature 21, 334: n = A,T,C or G
gctccagacctgtgtgtgcangctgcctcctggatgcccctcggttgtctaatggacatctcaaacctcacatgtctccacttgaaaaggatgagtttcatggaacctgagcatgcccatatgcccctactcccttgtgtgcccccacaccgtgcctgctcttccttcagttgatcaggtgaaaacctcagagtcacttttaacacctccatttctctcctgtgccaacaaccaaattatatccaaaatctgaccacttctcaccacttccacatggactgctgtgttcaagccaccaccatctcttgcctgcattagtccagcagtctcctanctgacatggggactgagattcagaatatttgggatcaaaggtcttatccctgaat

SEQ ID NO: 1264 - DNA, 298 bp, Homo sapiens
aatgttaaccacaggacgttccagctgtgactcattgcaactactgacaagcaagctggagtggccctgcttttagagagcctgaagatctactcagagtgaacaatacttgaagttctaattgagttacagaaaggaaactagtaaaaactaagaaagattgcgattctcaccttgaatatgcagatctaatttctataactgtgtttaggggtatttttctaaattactaaaataatgcttacattttcaaattggccattaaatatatcttcagatgcggagatgtgtatattac

SEQ ID NO: 1265 - DNA, 470 bp, Homo sapiens
  misc_feature 364, 410, 418, 423, 440: n = A,T,C or G
acagagctctgcaggcacagctgaggacggcctctctttgggtcccccagactcatccctgggagctcacaactggcagagggagacaagggcgctccaagcagcagccgtgggggagtggtgatctccagcttcaactgccgggccgtgaaaacaggaaccagccctccaggccaccgtttctctgaaaccaaagctcagcaaccgaaaaaggatcaaaaaagcagatggtggaggtggagcgaggcagctgtgcttctcagtgccccgtgccgtcctcagccccatctctggcacaagtggtccaagcagcccaggactccatggcaggccctacccttgcaggtgaactgcctcgggtctnccagcctccacattcacatatttcaaacagaaacaccaccaacttnctgggctnacccnttgggaaattccccaangaaaacaaagggggactcatatttgggcca

SEQ ID NO: 1266 - DNA, 202 bp, Homo sapiens
ctgaggaaaaacctacaagtctacttggaggaatccccagcattttcaacaggatgtcagaatgaccttgggctatgttggcaaagcacaatgggaagaagacaaccaattgaaggtcaaactaggccttaaaaaaaattgttcttcctaaatgaaactttatgtaagacccaaacttcctttatgtaaaaataggataccc

SEQ ID NO: 1267 - DNA, 258 bp, Homo sapiens
ttttccgtctgtccagctccaccactaaatagtgtctttattccgaggagctacctgatttgggactcagtcttcctacaaggcaaaaagagaagacctggatgctccacgtggtccagacatggagcaagtaaaccgagctctcgccacaccgcacagtctcctcagcctcctgctcaatgtgctttcattggaaatgcttattgtaaatgatgacacttttttaaaaccaaaattcaattaaattcaatacatatt

SEQ ID NO: 1268 - DNA, 320 bp, Homo sapiens
  misc_feature 178: n = A,T,C or G
gataataaaacatgaagtggaagatcttctagaccagcaccttaaatttgcagatgagaaagttggaacccagaaaggctgagaggctcaaggtctcacaactgtttatgctcaactgggaaatgaatttgtttctctggcccatcaggtcaacattctttccactcagctatgccgnctcctacctcctgaaaagattctagcaggaccctctgatgaaaaggaccttatctttttatatctgctgtttaaagcttttttttaaaatcatcgcacgattttatgagttaagttatgtacataaacaaatactattactt

SEQ ID NO: 1269 - DNA, 498 bp, Homo sapiens
  misc_feature 477, 479: n = A,T,C or G
gagcatgaccagcagactaacgcagcaagcagatgatgctcctgatgaaaagggcagacccagttgagcctgggctacgctgacacagactttgttgctcttcatttggcaaagttcctcccagaatccctgcaggcatacaacagatgttcagtaaacactcggttgatgagaactctgggaagacatagctgttcgacgaacaggcatcagaatttatcatttgaaattatcaactcaaaaattctttttttcctcatacatattctgcttatgtatcaaaaattatcataagaaaccaagatttctcagaacatgtgaggtcaaaatggcttataatgtaaaagaagtggagtctcaatctatactcagtatctccctctcttttattcatacacatatggacacttgcacttctaagaaaaaatgaatttttttaaactcattcatttattaaattgatatggattaaaccangnaatattcataacatattct

SEQ ID NO: 1270 - DNA, 342 bp, Homo sapiens
  misc_feature 2, 17, 283, 290, 292, 306, 329: n = A,T,C or G
cntctctggagagcttncatctgcaccatgagcccatgccatcttctgactcctggagctacagtgaagatatattttgtattaatgcttaacttcttcatttcagttgccattgaggtagcctaataacattcataagtaaatactggattttagtttgcaatagaaaaaccttccatgtaatataatatgtctatacaattaataattaattactttgttaaaatatgtatctttaaataaataaacattggtagagaccaaaaaaaaaagaaaaaaaaanggccacngnggccaattcagctnggacttaaccaggctgaacttgntcaaaaggggggg

SEQ ID NO: 1271 - DNA, 159 bp, Homo sapiens
  misc_feature 25: n = A,T,C or G
ccagcatttatggatcttcagaggnttctctctgtgataattcctcatcaaattaccaataagaaggatatgaaactacagcccccacaaggatgcctggtgaccttcggccctgagatttacagtctgcggaagcaataaagttcctctccctctctt

SEQ ID NO: 1272 - DNA, 521 bp, Homo sapiens
  misc_feature 445, 470, 487, 492, 498, 501, 508: n = A,T,C or G
ggcaccgcaagacaacgtatctcccctcccctgtgcaatcagtcaaagaacatttagtcaacctgaactgggagcacagcgctcctggggctgttgggcattcaaaagagtgtggatcagtgttaaaagtgcctcatggagaaatggaggcctgaaagcgactctgaaggaggagtggggctcagcaaacagcagacgagtttcaatccaagcacccattacccccctaacacacggcatacgtgcatctcatctcctcctgtgtcgctaagaagctacccatatgtctgtcattaattctccagaatccttggacacacccctctgcagagctttctaacagaaatacaagtctcagatttttttttaagttaaaattgagtgcagcactcatacctttcttcgagcatgaaccgtcaatcaacactgcctcatgagctactgntctcctgctctttaaaaagacaaanccttatttctttgtagngatcncaaagnggngggattnacccggaaacttt

SEQ ID NO: 1273 - DNA, 460 bp, Homo sapiens
agtttcactctcagaggaggattttgttcttcaattgtggagtgatctctatcaccagtgactaaagcagatgttggagcacagagagccataccccaaaatatgatgcttcggcatgctgactgctttgaaaattgaaaggcctcagaaataatcctcagtgccagggtctccctctgacctccccctacctccctttctctctgatcctgtctctcccaaagcacagaatgagctgttctctgaattcccttatctacctagaaactggacccccaaagaggaacacaatttgcctttgatcccttccctgaaatttcattaaccagagaaaattaaaacttctatcacaaggaagagactgaacattaaacaccatagctacagcccagacaaacttcttcccaaaccattgtttgttctcctgcctgttaaattgccagagaatcattcacaagac

SEQ ID NO: 1274 - DNA, 224 bp, Homo sapiens
ttgacaggaaggcaatcattcattcattcagcaagcaagcaagcaagcatccacaatgagcctggatgccacatggaccacgatcaccaaggagatcgataaatcccacaatgttgttccctgtcttcaaaaatttgtcaagaagattgagatccactgctgtaagattacacagatgccctcctcatcgtctatgacaggctataataaatcttgccagactt

SEQ ID NO: 1275 - DNA, 338 bp, Homo sapiens
aggcgagaaactgtgggataagaggctgcagcaattgcatgagtagaccctgaaggtatgaggtttgttaaaatggatgttcagagaaggcctgacacaagagggccactccatttgtccccacggacctgggccggatctctcaatttcacactgatggagcctgaaaatcaacaaacaagacggcaagaacagggaagacattgttctctccaaagtggacaatttgtgacaggcccaggaaggctgcctgggctttatagcttttccagtggttcctaataaaccaggctttgtgtgagcctcgttcaagccatgcggggccctgtcgtttcttt

SEQ ID NO: 1276 - DNA, 158 bp, Homo sapiens
  misc_feature 40: n = A,T,C or G
tcccaggtgtatccaccagctccgaagagacagcgaccangcaagaacgggccataacgacgatggcagctttgtcaaaaagggggatatgtagggaaaagagagatccgactgttactgtgtctacatagaaaaggaagacataagaaactcctttt

SEQ ID NO: 1277 - DNA, 144 bp, Homo sapiens
acttcagttgacccaggcaactgaaaccgaggaagcaaaaccatggaccgtggaaagaagcatcatataggactactgtattatgtattataggtggctgtggtatcaacatacttagttgataataaaaatgtttgcaaagtc

SEQ ID NO: 1278 - DNA, 561 bp, Homo sapiens
  misc_feature 38, 54, 58, 63, 68, 79, 82, 86, 88, 90, 110, 197, 522: n = A,T,C or G
gagcccatcatggcgacgccccctaagcggcgggcggnggaggccacggggganaaanggctnggctncaaaactttantantgancngnctgcacgggactggcgaaanggggctgaaccatcgaaacagggtattatgaagccagctgggccaaataccttcaactggagaaaatggtcatttgagccgaacttncagggaaagctaaagcactcgggaagttattatatgccaggtgggattttgggcctggtaaactttcttcgtttggacacagtgggtccccaagatacctttcacgccatctatgtggcccctggggaaaaatggtttttttcctggaggttgacacctgggcaagaaagccttctaaagtttcatttgattcgtaaagaactctctcctcacaagaagcttcaagcaaacagccctcacccaagggactccatgaaatatcaaaagcccatatccacatgttgctagaggggcttaaaaaactacaaagggctggagaaatttncaaaaaaaactcaacattggctttttttccccctactca

SEQ ID NO: 1279 - DNA, 338 bp, Homo sapiens
tgtaagctccaccagagcagcagactctcataaaacctcatgggatgaatgaaaggagtgtcatcccttaagacattggcaacaaaagcatagcctgacatattctactacaagtgcctgcagtaacctatgcagagaggagcaaatgaactcccacaggaaggtggacgatccctgagccagagataactggaactctggcagtttgagtggacactcagtcacacactcacacactcactcacagcgttatgcaattccaaaaattatgtgtttggttccaggaagatacatttttcccctctaagtccaaaataaagatagaaatgcatatatct

SEQ ID NO: 1280 - DNA, 271 bp, Homo sapiens
gttcccagtagctgcagcagtgaaagacagtgattggctccagtgctcccagaaggatttgggctgaagccaggggaacagaaccagaagaggattccctttccagagaccatcaggctcctcatgtcttgtctctcctctctcccctcgtggtggctcaggatttcagtatggctgagcagcccataggtaggcctcaacacttggtgtcaccacttcagtctctatatgtttggcccttgtgtaaaataaacaaaaacttgggcaaccc

SEQ ID NO: 1281 - DNA, 490 bp, Homo sapiens
  misc_feature 455, 476: n = A,T,C or G
gagctggtcagctctgacctggagtgtgtctaccctgaccgtgtgacaccgggatcaagaccctctcctggggtcttgaggacgccacatgtgggcgttgctctaaagagcgcttgctcctaagcctcctgcacatggaaccccaccatggaatctgcttcccaggaactcaccctgggaccagcccctctgagactcaagtcaacatttggtcctagggctgcaaagaggaggtgctaagaggccaaaggctacttccacctggagaacgggccccgcgtgccagctcccccaaggcctggccaggatgctctgctcggaggcctgtcctgacttcctctgctcattgcacctgaaattacctaaccaacacctttcttcctcccacccttccacaaatacttattgagcatctgctaggtgccaagttactggtctgcacaatgggcattacnggccctgaaagaaattaaacnggaaccttcttgtt

SEQ ID NO: 1282 - DNA, 512 bp, Homo sapiens
  misc_feature 455, 462, 465, 476, 490, 492: n = A,T,C or G
gaggtgattcatcccaccagtgcttcttctgcagacagtaaaatatggtcccagtgaccatctcaggtgccatgcttccagcattttatcagacaaggctgaagacagcagacattaaacttcagttgtgtgctccacagaacattagctgtcttcatcattactttgcatctttcagtgataggctgcttgacatgttaggaacctgaaaatgatcccatcttgaccgaatctcaaatgcccttcctgagcagcactgatgaaacagatggagcacctggatgttatctgctttggatctggttctcaggaggaggaggagcagaaggctgggcacaacggtgtttgaggttctcaactgcccccagaaagaagggttgacttgatttacattgacttcaacttgattatcttgatctacttaactggcttttcggcttttatgcttcaagccnccggcangantggcttccttntggtcaacttgcangncttttgacttgggatttaac

SEQ ID NO: 1283 - DNA, 393 bp, Homo sapiens
  misc_feature 212, 244: n = A,T,C or G
gctgtaagctccttggaggcaaggattctgtctgcttcacctctaaagcttcagcatggcatgtgccctgcaaatggcagtgccagtggacatatgctagatgagtggatgaaggaccatcccacatcagctcatcgtggagtatgcagctcagtcctcccgcctctcagggacaacttggatcttcaccgttcttcgccactaagaattcnagtcatctacattcagagggaagctgagcaanctggctcctgcccacactggaaaatttctctgcctaaaccagcttccctaagccgaggggagagtccaagatcccgaagatggcagggccgtgcaggctcctgggattaagacacaaacaagccctgttctcaggctgacagtaaatgg

SEQ ID NO: 1284 - DNA, 139 bp, Homo sapiens
ttactcatgtcagtaagcgtttactgagtatctcctgcatcctgggcacttctccactccaatgtgacagcagtgaatcaaacgacagctagccctgcccgcaggcacttgcattccagagagaggagacaaagaatac

SEQ ID NO: 1285 - DNA, 482 bp, Homo sapiens
  misc_feature 429, 434, 442, 448, 455: n = A,T,C or G
gtccttgatctctgtggctgtgagacgatgaatctagggtgtcaccccagacaacgaggctgcttcaaaatcccaaagtccaaaggaggactgcttcataagggaaggattgtttataggttggtatactgtgcaaaattaagtataggaccaaaaacagccaagacatttgaaagttggaaagttgatggtaatggtttcctgggattggaaggcagacctcctccgctgatgagcaaataatgaggctgtgctatgatcaaggcattgtgacccctgtgacccacacgtacacatccagaaggtctcctggagccagaaagtctgggacaacaggaaaaccacaaaagaagaaaaacagctcctgtcttagctgattagccaaccttgcgaccttctaccattggaacatgctctacccttacttantaatncactttcnggaccntgggctntgtgacccctcccccttgggataataa

SEQ ID NO: 1286 - DNA, 241 bp, Homo sapiens
cctccatgctctgaggaaccccaagcagctcatggagaggcccacatggaggggaagaggagctcccagccagcattcaacttgtcagtaacggaagtgaaccatcttgaaaggggatcttccagtctccaatcaagcccccagcccacactgcttggaacagagaagccgtccatgctgagccctattcaaattatagattaatgagccaaataaatgattgttgctgttttaagccact

SEQ ID NO: 1287 - DNA, 222 bp, Homo sapiens
gaagtgggaatgatgcatattcaacgacgcctacaaaaattacttcagattgttagtctcagaaacccactggtggcctgaggggacatgcaaaaagaagaggaacaggagcagagatggcaaattattaaggtttcaagaccttaaaagagacaatcaaagtattcagattctcagtaaaattaccagattaaatcaaataaaaccccaccctttttccac

SEQ ID NO: 1288 - DNA, 280 bp, Homo sapiens
  misc_feature 144, 148, 164, 169, 187, 189, 234: n = A,T,C or G
attaaatcaagattatgtctgacaaccctctcaaaatgataaaaactaatctgcagagaaaactggctgcagaggaaccggctgcagaggaaccagctgcttcctcctcggaacatgaagaggtgaacagagagatgaagcctntttntcctccctcacgtttntgaangatcaaaatcaagggcancngggagaaagaataacaaaaccaacaaactggaggtcaaggagagnttttttcttttttttacctttctgccttttccatttttaataaaca

SEQ ID NO: 1289 - DNA, 435 bp, Homo sapiens
  misc_feature 372, 407, 416: n = A,T,C or G
ggcttatctccttgttgtatccagaatcatatgacaagcaagagtcctagaatattttatctacctaatcatcccactgccttattccagaaagaatctaaggaggaatttttatttcttcagtcaaaagatgcaggaaagacatcctacctcttggaagaatcattggactggacatccaaacacctgagtcctagccttgagtctgcctctcacagcagtatgaccctgggcaagtccttgtggaataagggcatggacagaatgatgtcagaggttccttctagctctaatattctacagtttccttttagttcaaatttaaagacaaaatgtctaacagtggttcttgtttgttatgaccagtgttgncaaaagagaagttgtacaaagttttttttgcctgnttttcatgnatgggggagggggggggat

SEQ ID NO: 1290 - DNA, 166 bp, Homo sapiens
caaacaggaacaaaggaacaaagtgagagtggagactgctgagtcatacctaggagaagactgcaactcacccagggagtgagtcttcaccctaactcaccggggaactggaccgacccagacaatttgttaagttctgtttccattaaacataattctgagtctg

SEQ ID NO: 1291 - DNA, 507 bp, Homo sapiens
  misc_feature 428, 430, 490: n = A,T,C or G
gaatttatgttgatgcagttaactccttgggccaaacagcactttttgttgcggcgttattgggccttaggaaattcgttgatgttctggtggattatggatcagatccaaatcaaatgggagccctgtgttgcacgctgagccccgctccatggaatgcaggagcattgccatggacatcaattgtactcatctccctccccagccgctgctttgatgggagcacccctgtccatgcagcagcattttcgggcaatcagtggatccttagcaaactgctggatgcaggaggtgacctgcgactccacgatgagaggggtcaaaacccgaagacttgggctttgacagcaggaaaggagcgtagcacccagatagtggagttcatgcagcgctgtgcctcacacatgcaggccatcattcaaggcttntntttccaacttcttgaaaaaaaaaaactccccgcaggggtttgtttacagcccgtcctggnggggttgggttcttttt

SEQ ID NO: 1292 - DNA, 192 bp, Homo sapiens
  misc_feature 27: n = A,T,C or G
tgaatcgaacgccacactcaggtgagntgagaaacccttaccgcgcgcactgcaatgccctccccttcactctgcaccctccacccccctgaaattctgcccttaggctacggggcgtcgtcctttcgcaccctcccccatgctgccaagttgtagctatagctacaaataaaaaaaaaccttgttttccag

SEQ ID NO: 1293 - DNA, 408 bp, Homo sapiens
gtggtagaagtctgtcttctccccgtgctcctaggaagaccttcatgtcctccttgaccaacaggggatggtggaagtgactctgtgtgacttgtgagacaagattctaaaagtcatgcacttctgccttgttctcttgggataactgctcttggaacccagccattgcagtgaggaagtcaaatagctccatggacatgccatgtgtaggtgttctggcaaacagccccaggtgaggttccaactgacagccaacgtcaaccacctgacgagaatgagtcttccagccttgatctgctgagtcatcgccaactccagccaatactgtaaggagcaaagatgagctgttctgccaattgtagcccaaattgcagatttttgaataaaataaatgactgttatcattgt

SEQ ID NO: 1294 - DNA, 316 bp, Homo sapiens
aagtctcagccatgaacctagcagtgaaggaggaaaacatcttatgtcttgttctctacaacacaaagatgaacataaagaagaaacacagactctggcctggagaagttcagtgtctggtgggggagactggataaataatttaaaacatttatttaacacataattacagtgcaatatgataagtacaatagctaaagtgtgggcaaagtgtcgcaggaacaggaataaagaggagacaacttccaaaaaaatcttacatacttaaccttttcccgacattttgacctgaaaataaatcagcataacaactcac

SEQ ID NO: 1295 - DNA, 149 bp, Homo sapiens
gctggtagcagaatggctgttgttattccaagaggccctcccggactatatcccagtgtgtatagtccagtgaaacgacgggaaaactatgaccatgaagcaaatctggagcaccacctgattttttaaggtagattttaccgaaacac

SEQ ID NO: 1296 - DNA, 233 bp, Homo sapiens
  misc_feature 89, 176: n = A,T,C or G
gaaaagtgtactggctcctgtcctggatcaactcagaaaatgaaacacatcggattctgtccaggccgggcacagcaacctggcccatncatgtggagcctgcagtgacaacttccgctatctgcacaaaactggagggaggctgggggtgctccaagtataagtttcctcatcancaaaccggaaagagaaagaccgacctggaggctggttatggggataaaataaatatg

SEQ ID NO: 1297 - DNA, 143 bp, Homo sapiens
tgtacagaggaagaaccattgtgaggataaagcaagaagacaaccgtctgcaagccaggaagggaaactttatcagaaagcaactgtgctggaaccctgatcttagattttgtagtctttagaaaagaaataaatattatttt

SEQ ID NO: 1298 - DNA, 201 bp, Homo sapiens
  misc_feature 74: n = A,T,C or G
gtgatactgtggctgacagtatttactgttaaatggagtggaagtgagaaaacaccacagaagggggcacctanattcgaaccggggacctcttgatctgcagtcaaatgctctatccctgagccctaccccctctacctgtaataagcttcttccgtgtccacctacggtgactcaatacaatcaagttccacccacacg

SEQ ID NO: 1299 - DNA, 77 bp, Homo sapiens
gctctgatgattcttaagcaaagagatggaagatggaatttcaaccccatggagatctaataaacttacccagagtt

SEQ ID NO: 1300 - DNA, 452 bp, Homo sapiens
  misc_feature 20, 24, 29, 42, 44, 50, 53, 56, 61, 70, 76, 88, 92, 96, 119,122, 128, 140, 142, 148, 160, 167, 168, 169, 173, 178, 205,329: n = A,T,C or G
atgaaaaaactgaggctggnaganggccntgcccctgcccanantcatgnatntgncctangatggatgnggaatnctgccccaccantggnggcnttattattacacccatattacanatntagaanactgaggctcancntgggtnccttgccatgancacacannnagangatangagaggctggctctgcctcctatgccnctcctgatccactctccaaaccctcctccagtcccctgctccaagccatcagttaggatgattcttataagccgggggtgtgacatgccaaaggtgtctctaccccacatactccctctggaancaggacaaggtttgcgtgaggtggacctgggttctttctggaccagggactttgcctccaagctcatttcctcatctgtaaaacaggaatccaaccaacgtcagcctgaatgggctgtggctc

SEQ ID NO: 1301 - DNA, 434 bp, Homo sapiens
  misc_feature 383, 416: n = A,T,C or G
ttcctcatcagaaggaagtacttcatcaattacgtcctcttcatattcatcaatttcttccccatcatactcatcttcgcttcccacatcacttcctgacacctctgcctcatcctccagatcgcttcaggagttcttcttcatcatcatcttcatggtcttccagtgccagatcattaccagagtcactgtgttcatcctacaaaatcagcatcatatccaaattaagcagaataaaatgcgtcctcaatgaaaaaaggatttataaacatctgcccaaatacctcattctaggaaattgtttctgataagatgccaaacttagaattctcaagaactgaggggaaaaaaacacttgagggcagcaatacatggagctcaantatgaatacctttggtcccttctacctcccctnatccttttcaaactcatt

SEQ ID NO: 1302 - DNA, 456 bp, Homo sapiens
  misc_feature 101, 182: n = A,T,C or G
ctctcaatctggggcatgactttgaagggaaggttgctaagcctcctaaatcccgatacacaccaatgccgtttccccactcatctggaaacctggtgggncctgcccaaacgcctgtatgccaattccacctggctgcttggcgacccaccatgcccacattttccactcaagcctttcanatctgctttgggcacctgaagacagagagaatcatctttcaagagtcagaaactttgcacgtgccattccctctgcttagaatgcttttccctttctcccaattgccttatcatcagcctgggaaaatatttatttcggctcctaaaatctcagatatcacttctccaggagctttcccagatgcctcacttgattccagaaggagctatcgccacttttgcctggcgagtaccgttttcaccgttacacttatacgctatggcaatttattgg

SEQ ID NO: 1303 - DNA, 187 bp, Homo sapiens
tgactatatgacgtgtgatggcccaagactgagtcaagaagcagatgcaagaatctagctgactttcaggaaattagaccttaaagcgacttgcaaaaatgaaaaacgaagcctcttccaaattttttgttttggaaaattagttatttttcataaaaaacttacattaaagtatttatgtcaaggt

SEQ ID NO: 1304 - DNA, 449 bp, Homo sapiens
  misc_feature 337, 378, 400, 426: n = A,T,C or G
tttcaggttttaggatgaccagtgagatggtcagaacttcagaaccttccaaggtgatgggtcattcaagctccaggaacgtcaaggcctcaacagtttggacataattttaagcaacacatataagacccacaggtctccactgatatgactggggatctcatgaagaaactactcgacaaagacagatactggagggatagaagagtctatgaagtacagaaaagaggaaagatctgcaaacaattcggtgtcttcttttaacttgaaactcattctacccactgctacagctaggtactgtgctcttgctcagattgctggagggttttgttgngatgatctccttcaatacatcaatactataagttctataanaatcatctcagagcttgtttanaactcattttttttctttttctgggntatgcccttataatattcattta

SEQ ID NO: 1305 - DNA, 309 bp, Homo sapiens
gtggggtctttcaccggccatgtccctggctgactgttttcctgctgatcctgaccagcgtccccggcagccatggcctgcattcgtgttggtccctcctcctgcagccccgaggaggcagggctgtctgtggatcccagatcggttgtcggaaggcccggaagaggagagctgccctccaccaccactgtctcctcctcctggacaacagagtcagaacactgctgagatggggtgaagcataattgttgcactgagactcaaaactacaggcaagaaggtttgaaaatacagaaacatttcacgaat

SEQ ID NO: 1306 - DNA, 174 bp, Homo sapiens
gatgatgctgcccttaatgctcagctgattacagactaaacacaaaagttcccagaggaaaatggtggacttgggagctgctgcctcaggaggatcttgagtgttagtggttcctccctatcagatgtacctaatgcccaggatttaataaaggatcattcccattccaccacc

SEQ ID NO: 1307 - DNA, 464 bp, Homo sapiens
gagcccctttcctggacacactcgtgtctttcccagggaatgggaagaaacaaaaggatgatgacatgacacctaataagtctggatctggaagtaagtttgatctacggttcattaggctggagcagaaaaaaaagaaagggtccggtatgttcgcctgtgtgccaggtatggtgttacgccactcatgtgccttatattccctacaacccctcaccccaatttatcacttcaaaaatgataaaagctgagacttggagaaactagtaactaaccaaaagtcacccaagaaggaggtggcaagctaagatcaagccccactttggtgggagctaagagtagcccttggtagagtcatggggttggctaattcttgcctttggaacctgtttctatctccattcagttcctttctttcctgtcagttggactgtaaactctaagatcacgaaatttccctttat

SEQ ID NO: 1308 - DNA, 481 bp, Homo sapiens
  misc_feature 375: n = A,T,C or G
agctttgctagccacgtgtggttcctagaccatcagcatcaacattacctggaaagggcctcttacagatgcagaatctctgccccaacccagacctatggagttaaaacctacgggatttctagatgtgcgggagtgaaggagctggtggctatcagacctcaaggtctccaacaggacaagatcaagagggattccactcccacagaccactcactcaccctaggaagactgtgaaatgcctgtcctggtgcttagtttgaattgttgaaagaccatctttacggcagaaatgctttgtcatttcacttgataagggccttgggtttcaagccagtttactcttttctgtgagcattgaaagccccctttttnatttgctccgaggcaggattttgacttcaaagccaaaataagaatttaggaagaaaagaaagggagggaggaaaaagggaagtttggtccaggaaaatgaaaatgc

SEQ ID NO: 1309 - DNA, 177 bp, Homo sapiens
gggcaaacccatgctttatgaagcctgatgcttacacaattatgggagccttctttgaaaaaaaaatttcaaaattacaaatgcaaaattaggtacaaaagggaatatttacaatgagaaatcaccacaaatggcaagatttaaacagctgacaaattaaacagcgcaaaatccagg

SEQ ID NO: 1310 - DNA, 366 bp, Homo sapiens
gttgcaagaaagctcaagtagcctatggagaggatgcaaggcttccagctgatgccctcagccaggctcagtagcagccagaactagcctaccaacgaacctgctgatcatgtgcataagccaccttgaacgtcgatcctcctgcctggtggagccatcccagctgatgccacatgaagcagacacaagctgtccctactaagctctgctcaagttggatattcatgagtgaaataaatgactgttactaagtaattaattttcgggtggctgttatgtagcagtagataattggaacaaagcttattgacataatacatctatatcacatcctccaatccatttttttaagtaataaaagtggtg

SEQ ID NO: 1311 - DNA, 292 bp, Homo sapiens
gacccaaatgtgaataatgccaacagcttgctgtcagccctgaagtttcctcagatgtctcataaacactggaatcacttcacacgtttctgaaatgtgaccacctctcaggaggagttgacaacactgagtaaccggaagggaggaacacttatcccactgaaactgggataaaggttgccatgaatgcaagaggtgcctaaatctcttggcatggggacttaatggggccttatccctcctgctatatggtagcaaaataagaaaataaaaaccaaagtaatatgcgttc

SEQ ID NO: 1312 - DNA, 195 bp, Homo sapiens
atgaaagaaagagaagtccctaagtagaaactgcaagggccaagcagaacattataccatgtaaggacatcatctgtccctggactcttaagcggaagatcatgcaaatagtggactgaagtcatcccagccttcaaaagagccaccgtgggggggaaataacagaaagggataaaaagctgtctttcgtaaccc

SEQ ID NO: 1313 - DNA, 475 bp, Homo sapiens
  misc_feature 361, 364, 369, 375, 382: n = A,T,C or G
aacagttctggaggccggaagtctgaaagcagtatcagtaggtggaaatcagggtgcccagcttctggtggctgtgacattccttggcttaagctgagatggcagtcaatgagagtgactgcagaaagtttcagaaggacacatgggaatcatttaaccaggccaataaaatcagctatttatacacttcccccggaagacatagcccttgcttcactgtctgaaggagagaaaatgcaaaagtgataaaggcatgaaaaagtcatattcctgagctacaagagagaaactgaggacagtggagatgagaataaaatccctaaagcttaaaggatgctggatctggattctactggatggnggngcttnaaaagnggactgncctatccttttcacatatgttagaggtcacacacagggagcccacagaccccagcatgccaataaacgtgtttcttgtgacccataataaatg

SEQ ID NO: 1314 - DNA, 425 bp, Homo sapiens
  misc_feature 368, 377: n = A,T,C or G
gtctactctgtgaaaaggaaatgatcatacataattcacgcatttgctgtacggatttaattaaatgatagacaaaaagtagagtggcacaagtcaaactcaaaaaatagtaacaacaaaatcaatttcaaaataagcaacagcaataaatgttacctactattttacgaatgaaaatactgagaccaataaaggcattatagtatacatagccttggaatcagaagaccaagaacatacaagagaacatagccttggaatcagaagaccaagaaacaatttaactctgcccctctagagctctgagaacttgggcaagccttttaccctctgtgagtttcagtttcctcatttatttaattggaatnataattccngatcacctgaatgtaatgaaaattaaacatccttatgtaggtgaaacc

SEQ ID NO: 1315 - DNA, 478 bp, Homo sapiens
  misc_feature 108, 137, 168, 172, 350, 360, 361, 442: n = A,T,C or G
gtagaagattctgaggccctgggcgggaactagtaagccacaatctggaagagtcttttaccaccatgtggaggagaactagagcactcatgttgaactattaccganaaaagtaatcaacttcttttgtgttaagncactgaaaggcaagtgttgatttgttgcagnaatnggggctcccttaacacacctgtcagccgggccaaactctatcacagcataaataatcttttccttaaataaatacaggtaaaagaataaagtagacctaaatgcattaatatgaatataggctcaaagcaaaatgttgggctataaatgttcagagtgataattttttaagttgatgngtaatttagnnccagtaaattagaataaaacctaaatgtcagttcaaatggaattttttacatgttcatgcccctgtataatcacctcccanaaccaacatagaaaatacttcatataaaatgttggg

SEQ ID NO: 1316 - DNA, 325 bp, Homo sapiens
tggcaagacactggcctgatagaccaggagctactccaccaccagcagctacaaggccttggcagaatggaataacagcaaacaacattggaggaggacttgtctgggagagcagccattttaaagaagagcacattaagtcacaaacagtcgcagctgatctactttgcagcatcgccatacatgcctaactaaatattgaaatcccgggaaaaactcactgtgcatcatgttccagaaactagctttgcaaacagtcttttcagatgtgtacattttgtgtatttgaggcatataatatatatattttcctccatgttcaccc

SEQ ID NO: 1317 - DNA, 275 bp, Homo sapiens
acgccatctccaaatacggtcacattgggggttagtacttcaacatatgaatctgaaggagagacacaattcagtccttaacacagtgctttatggattgtatctgcatcttccatcttatcaccacccaaatccagcacctgaattggtgagtgttgccagtgagaggccaagagccagaagagcctgcttctgcttgcagaggatgcacagttgtaatagttcgttttcatgctgctgataaagacatacccaggactgggtaatttacaatc

SEQ ID NO: 1318 - DNA, 352 bp, Homo sapiens
  misc_feature 20, 24, 26, 39: n = A,T,C or G
gttcgtgaatgactgtggtntcanantgactgccaatgncgactcctgataccataaaaggaaagactcctgtctgaaggatgtgcctttatcccagacactgacaaacacctttgccaagagagttcagaaacgactgcaaaccccaacccaagcaactggactctggaaaacagctcatgaaatctcagcatctgccttgtctggtgagcctcgtagggcactcacctctattacggaggcttgatggcagcggcttggtttgaactctgtattacttatctattgctgcataagcgaattaccccaaagcttagcccgcttaaaacaacacgcatttattatattcaac

SEQ ID NO: 1319 - DNA, 243 bp, Homo sapiens
  misc_feature 44, 71, 83, 86, 92, 95, 97, 103, 109, 117, 125, 133, 146,158, 170, 179, 185, 230: n = A,T,C or G
tcacaacatgggggtttgggttggttttgggatgggcacacttntgcccctgggacaatgggaatggtggntttacccaggcnttngggganaanangtgggnaattcnaccccctnggatgctnacaaaccntggcaaatcttancattttcccctnattgaaaccggntgccccttnccttantaactgcccttggacttacctcaccattttgtgtggccttaaatnaagaatttggggg

SEQ ID NO: 1320 - DNA, 476 bp, Homo sapiens
  misc_feature 364, 446: n = A,T,C or G
actcagagaagaatggaggcagaggctggagaggaggctgaggatgctggacaaccctgttgagaaggaaaagccggcacacaccgcggactgagctctgcctgcctcaccgacttcaaagatagcaagcgaccacttttctaggggaaaaaaactaacactcaagttgtgctgatttactaaacaggacgctctctatttgtgcttccatttgctaggggatttacatgtgaaacctcccccagtgctaatgggagttattatcctgctcaatcccctccgcacagaggacaggatgaccgcaagtgggataggacgcttgggctatttaataaaagaactcttggaattaacacttcttcanggctcacagacccatgtagcctagtatatttccacatttccttgtcattttgaaatggttcaagtcttgagacatttgaagngttttcttctaagcttaccgagggcaatgg

SEQ ID NO: 1321 - DNA, 66 bp, Homo sapiens
aggaatcaaaagaaggaggaagaatagaatgatttggaggaaaagaaggagaaagtagaggagttg

SEQ ID NO: 1322 - DNA, 226 bp, Homo sapiens
ggtggcccggcctccctgttccatcttctgagaggagctatacccattttgcaccctgaacctccaaactcagaagtctctgaggagccctgaataggagaaaatgtggctgaaaatgaagtggaaaatcagtgtgataaccaaatcaagatcacgcctcgctgggaccctgtcacactaaagcttccagagcatagtcgtttttaaaatctgtaatagtacctgg

SEQ ID NO: 1323 - DNA, 465 bp, Homo sapiens
  misc_feature 243, 363, 366, 429: n = A,T,C or G
gaagccaagtgggaagatccttgctggtttctccctctgaggaagaaggaaaatgccatgactcccactatggcctctcttggaaccatattttgaggtaccctacttccttcttgagtgtcagcagagcaactgtgggactggcatgagatttggtcatttctaggagagcgaatgccttttgcctctttgatgagaaaactagacgagacattgtttagaaattcttgagctcagactttngcattatgacaacgtgcattcaaatctgccccagccacttgcgagctgggacctaaagccgtgagcttctggttgtttatctataacaagcggatcccagtacctacctcataaggctgntgngagggattaaaataaaatgcatctatcagccagcttgcaggtctgcacttaacaggggctcangtgcaataccttgataagttttgatagtttgggata

SEQ ID NO: 1324 - DNA, 303 bp, Homo sapiens
  misc_feature 2, 9, 12, 15, 22, 25, 29, 40, 41, 43, 49, 53, 54, 55: n = A,T,C or G
cnaacctgntangtntcatctnatncaantgtggcaaccnntnccttgnccannngctggagctgacactttctcaacttcacctggatggacactgaagtccaggatgggatgctgctacctgcagctgccatctccctgccaatttaaggatgaagccaatgcccaggatggcagagctgagagctggaaggaagccaggtcctcgctgacattgttgacacactgcatcagccatctctcagcctcccacctctagatttcctgtgacttgggaaaataaatttctgtatttgtaaagct

SEQ ID NO: 1325 - DNA, 458 bp, Homo sapiens
  misc_feature 193, 220, 224, 227, 230, 233, 276, 278, 281, 293, 303, 305,308, 321, 325, 330, 345, 348, 349, 355, 356, 360, 371, 375,379, 380, 404, 421, 429, 440, 444: n = A,T,C or G
aatcaagaaaacaattcaataagaatccattttccttggtaacaggacacaattgaaaacactggttatttaaccaaagcttcatctgaaatggcatattttacgggatatgacgagactgctttgaggaatttaagtggaccttataaagttgataaagagccccttagaaagactggcctagtacctcatntacttggttcccttaggagcctaggancctnaanatnttnggggacctcaagaagagagaaattcactcattttatgcacatntnacnggcatagtctangggggaatcntnggntggggttccccgntttnaaagngtttttaaaaccaanttnnggggtnntttntaaacatttcncccnaagnncacctttaaaaccctttttgaacnctttttttttttttgtntttgcgcnaaaatccgggncccngggaaaaactaaaa

SEQ ID NO: 1326 - DNA, 212 bp, Homo sapiens
  misc_feature 4, 5, 31, 33, 35, 37, 46, 51, 59, 61, 73, 112, 141, 166,190, 195: n = A,T,C or G
gagnnactgctcaaacaagaacacaaaaatntntnangatcctacnacagngggttggncncagtgcacgctntgtatacctatcagacaaaagaaaatgtcaagcaagtanaacagagacttagctgtgacagctaaaanatttataaagtcatgcttcccatcnaacctatctggacttatcaacagnatgcntccagcagttattcccc

SEQ ID NO: 1327 - DNA, 483 bp, Homo sapiens
  misc_feature 349, 372, 375, 385, 393: n = A,T,C or G
gtgtaggtcttgcctttccagggataagtggccacatagttcgccgtgttccccgcagttattccagtacatgttttatacttttggtatgtttgttgatcacggtgatggtgattgctctcaacacaatgtctacttctcctcgacggtcaaggagggaaatagacagagcccagaggtggccagccatggttcctcaagacctgccaagaagagtgcaggccaccagagtctttgcaggtataattgattaaagatctcaagatgaagtcatcctagatttaaatcatccacatggagctgccttcaaaggcacagctgcaggcgagggtacatttctaaatcccangactagtggccttgttagaaaanaanaacccggggngacccccngagaaaggagatgtgaagatggaggcagagactggagtgatacagctccaagccaaggatcaccagccatttcaagaagctaggcaagaa

SEQ ID NO: 1328 - DNA, 272 bp, Homo sapiens
agatgcagttttgccatgttgcccaaactggtctcgaactcctgagctcaaagcaatttgcccgccttggcctcccaagctggaatgacagacgtgagccactgcaccccgccaacattggcattctctgctgccttctctggactgaggaacttcactcaacaactgggctcacagccctttttccacagagattttgtggaatagcctttttgtctcatgcctgcttttcatttatttgcttgtttgagataaattaaaagcagaaaatg

SEQ ID NO: 1329 - DNA, 450 bp, Homo sapiens
  misc_feature 1, 20, 43, 45, 68, 72, 93, 122, 125, 131, 136, 147, 192, 199: n = A,T,C or G
ntatgacaacaaaaccaccntggggcccaaacctggaagccgncngctatggaggaccctggaagcangcanagaaaggtttggagttttcantgcgatgacaccagcgtgcctgcggaagnggntgtgtntactnttgcctccttncccacccaattccgtcccaggagcccagggatggaggcccaaganacggatnccacaggagccagcacccactccaccccaggagctcagcaaacatccacagagtgaacattccaagcaacatagtccaggagccacgttccagccatggggcctctgcactgctgtcctcttcacatggcctgcccttcccccagaaagagagaagaggccctctctggttgtcccatcaaaactccacccttctctcaccctcctcccagctgtatcccttctctgcagccctaacatgcattccacttt

SEQ ID NO: 1330 - DNA, 479 bp, Homo sapiens
  misc_feature 377, 402, 416, 422, 435, 441: n = A,T,C or G
ggtgtgggcacacacactctctgaacagcagaacttctgtctgagagtagaagctgaagagcagaagagacactatgggaatcaggaaagaggaggtgatctgggccagcagttgaagcacattgaaacgaagaagaaggctgacttctcaggagctgcctggatgctggcctcctggggaactggaactccagtttgaactgaaattccctgtatacttgtcaggaacatccactggactgtgggttccttggtacaaaaactaagtatccccatgcctgccacagtgcctggagcagaacagacactcaaatatttaataacgtatgactgattgtgtattacccgcggcatcaatagaagacacacaggggggnggaggataaatttgggttaaaaaanaaggctaaatctgntggtgntgcttcacatganaatganagtctttcggtttatggtggctccccggccaaaacacc

SEQ ID NO: 1331 - DNA, 171 bp, Homo sapiens
  misc_feature 120: n = A,T,C or G
gaattcatgacactgaagctacccaacttctaccatgcctataacatgatcaccctaggaagtggcagagtaacccgagggaagaagcctggatacctgaatgactatatgaaacacagntgccttaataccctcgatcactcactacggaactctgtaataaagtatatt

SEQ ID NO: 1332 - DNA, 251 bp, Homo sapiens
atgctatctatacttatgttaagcatcttcagagacaccatggatgatcttcattctgaatcccaggaagaattctggaaagcaatcacctacctcttgatattttctccgtcagatattacctaaagatctttttgggacctggagaaaagggaaggtagaactgattgataacttctatttatatagaattaaaagaatatgaaaagtttagataaaggagcataaataaaaaccttctactggcaaac

SEQ ID NO: 1333 - DNA, 446 bp, Homo sapiens
  misc_feature 348, 362, 364, 366: n = A,T,C or G
gttgtctgccaacgctaactggccagctctgacaggaggtgcgtggcccaggaggagccatcaggccagttctctgggatactgctgtgtctccagctctgcagtttgctctgcgtcactcagcggcagacggagaggcagacacgagccccttgtgagccctcctccttaccgtcatctcacaatgctctgaaataaggaggcaaatggctgaggtcccctcagttgaagatgtgattgagttctatctaccagaagcatatgcctcctggaagcctggttctaacacctctcacaaaatccttcaagcacttttttctgttccaaggtttgcttatgggggacccnaaggaaagggcttnananccctaaagatttgctgagtcatatgaggggccagcaaacttttcctgtaaagggtcagataataaacattttaagctttg

SEQ ID NO: 1334 - DNA, 498 bp, Homo sapiens
  misc_feature 340, 367, 369: n = A,T,C or G
gtgttgatcatgaaacattttcaaccaaaaatagtagagccaaatttgagcattgccaacctccacccacctcccttcatcacatggatttgttccaaacaacttctggcccttcaagcaaggaaacactccttcaaaagatgaacacttgccatcactaacattgtgccacaggctcttaagacaatttcaaatggaaatgcaacgaagttttgctaatggtagcatcactgaaataagtgtagtgtctcaaaagactcctatgtgatggtgaagaattaagtgtgtatgtttaggcacaagttttatttttcaaagaatatttcatcttgctatttgncgaatgaaatcttaaggaataaaaagngncttaagtttttccaaattgcaaaaaggaattaccatcttcccactgactccatgaatgccaaagtcactgaaaactaagcttaatgactgttgaatcaatttccaaagatgtaaaattctgctttaata

SEQ ID NO: 1335 - DNA, 345 bp, Homo sapiens
  misc_feature 289, 310: n = A,T,C or G
gcaaaatacatgggaaaaacaaaacaaaacagtgaaccaagaactcaagggagaatcttttgagctcattttctgggtgaatgcttccctcttacccgaccaccagaacagaggagcttccaggaagttagagaattgaaaaatagagaaaaagaatgagtcacaagaggatcttatcatctgactaagtgggagactggataaaagccttgtaaaatcattgcagcttatatacatgtgtatggttatcaagtagcattctatttctcaaattaagcatataccgcanttattttgtgagactataaanttcttctagaaagaaataaagaacattaaaattct

SEQ ID NO: 1336 - DNA, 297 bp, Homo sapiens
aggacttgctcagaacaagggaagaagatgactatgcagctgctcggtaacagcgtctagtcacactctgagatactgaggtcagcaagaacagaggatgcacactatgtcccatcttgcctttctgcccagaaagtctcagttactggaaaagcttcagaaatatttaccaaaaaatccatttgaaatcctgaaattctacttctcagaaaaacagtattactcttgtctagaaataacattcaggcctcaaagtgctatactgtcattacttctaaaaataaactgagcaaatcc

SEQ ID NO: 1337 - DNA, 175 bp, Homo sapiens
tattgtttctaaagaaactatgaagcaattcaaccagaggagaacaactactgtgggactgcagatgatcttagcctggaagctgcataaccctcctaccagatcaaatcattcagcatccatcttaaatgagaaatttaagtaactaaaaataataaatataaataattaaaat

SEQ ID NO: 1338 - DNA, 496 bp, Homo sapiens
  misc_feature 353, 354, 371, 387, 401: n = A,T,C or G
attcaagagagtgccaaaggaaacaacaggacagaaggagacatgaggaagagatgggacagacagcactcaaccctgagcagacgtgaggggcaaaagaaaaggcaacattaaggacccattcaagtttcaagtctcagcgtcccagaggatggtgaggatacagcaaaaatggagagtgcaaaaggagaaaggcagttgaatgtgaagataacggggtcttcggggcctacctactaagtctggtgggataaccctgttaaatgggaagagggaggcctttcttggtacattttaggaggaaaaaaatggctgcctggaaagttcatataccagcagcaaaaagaaaagcnnaatgggattaaaaaatnttaaaagcccttcacnaggaggttaagttntggcgggtgtgcccatcagagaccagcagagacaactggctctccggcctgagttcgcctacatcagaactagcacatctctctgtctaatttct

SEQ ID NO: 1339 - DNA, 371 bp, Homo sapiens
  misc_feature 309, 311, 313, 318, 320, 324, 326, 327, 338, 340, 344, 346,351, 352, 354: n = A,T,C or G
gtggtcaaatgtgtgggagtaaaatgtgtgtttgaaatgccttcccaggactcagtatggctcattttcctccttgccatgagctgcatgtccccatgattcggggcagcccgcctaggtgcctgttcctggctatcagaagagcacagtgaagtcctcctgcccctgagaagatcgaagactctgctgtggtcaaggttccttctccagccatatgtgttgtctaggattagacttttcaaacagtggccaggccttctgaggtcacatgtagcagtaaaagcaagctgtggccaaaaaaaaaaaggncngnggggncnattnannttggacttaancngggngnacttnntnaaaagggggggactccc

SEQ ID NO: 1340 - DNA, 479 bp, Homo sapiens
  misc_feature 351, 352, 361, 362, 366, 388: n = A,T,C or G
actgaggatcttctgaattggcggcctctacatatgcttctgctaaggagcatgtattcactcaacaagcattttaaacccccagcaaggcacaagctacaagggttacaagagacacaagaagagatgaggtggctcctgcttcccaaagagtgtggtccagggaaaggaataggcctggacttctcataacctggaacatcttttctcgaggccaaagaggtgatcccaagtgagaggccaaatccaaggaccctgcctgcccgatgggtgctcctctgctgagcagccaaaggcagtgccacgaggcttcatctacctccaatagtcacggagtctctccatgtgccnnttgggtttnntgcnttgttttcccaggaaagccttncttgacctttcagatcaagtcacatccacgtaccatgaacattcacaccctgtacctctcttttcacagcacttatcccaagagaaactcc

SEQ ID NO: 1341 - DNA, 481 bp, Homo sapiens
  misc_feature 369, 398, 400, 401, 403: n = A,T,C or G
cagagtgtgggaccaaggacaaattacagaagcacagcagagaaggttgcccggttccccgtttgcctatgaagttatgtagtgagcaaataagaggacactggagcacagcgctgcttagagccgaggctcagtaaacttttgttcactgatgaatgaatgtattaagctgaccagctcaatttgattcataaagaaatagccttagggcttttctgaggaagaacacaacatactttcaatccaactttttaaaaaataaaacatgattacacactcctaaataaatattttcagaaagtttgcctatatgtcaaagatttctaggatttggaagccagtatgttcgcaagttgtgaggacatctgngttattctcaacacttccttggcaaaacnanngngtccttacctgaaagcctgaaacaatataaaatgcaaagctgacatccccctgcctcggcaactgcactttcacccag

SEQ ID NO: 1342 - DNA, 306 bp, Homo sapiens
aaggaaagatggaaaagaggagttatcatttctttctcaagatcctggccccatgagcctcagtgtagccctagttcctgggatcagcaccaacaggcagggaggagaggctctggcgccctgcagacagcaccaggttcttggcatcaggagctggatacagagtccctgataatcccagccacagaatatttcaaactcaccgacatgtcctctaaatatcagatatgaaaaggcttccactcttgcacctgtcttgctattattttacagatgtgttctaaaagctataaagacggaaatcac

SEQ ID NO: 1343 - DNA, 471 bp, Homo sapiens
  misc_feature 339, 350, 355, 358, 361, 370: n = A,T,C or G
ataatacagacatgtaccccaccacacacaatgtaaactgcaaaagcaaaaaaccgagatgcctcgtccacagttcaaccctctgcgaacagagccatcctggataaaagggctgctgtcatgattgccataaactgagtggcctgaaacaacagagtcagaaatcaaggcatctgcagggccatgctgtctccgaaggctcggaatatggacccctccttgcctcctcctagactctgggcaggctgcagatccagaaagccgaagctgcagcaagtcggaaggcgcgccgcaggaggagttccttcctcaggagactgcagtctttgctcttacggnctttgaaaaanatggnatnaanccccccacnctatggagggtaacccgctgcattcaaagtctacagatttaactattaatcatatctaaaaaacagcctcacagaaacaccagactggtgtttgaacaaaa

SEQ ID NO: 1344 - DNA, 463 bp, Homo sapiens
  misc_feature 406, 433: n = A,T,C or G
catgtctttgcagctcttctcaccaagaattggagtctattttctcaactcattaaatctgagctggctgtgtgacttgctttggccaaaaagactttagcaaataagatataagcacaagcagaggtttgaaaagtgctggttcgctggggcttactgtattactgctcttgaaatgctgagatgaccatgtgaatgaatccaaggaagcctcctggaagatgagaatgctgcatagaagaaaacagaggtctccagctgacagcctgccaaacactagaaatgtgaatgaggccattctggatcatcttgtcaccagctgacctcccagctgactatcagtgcatgagcaaacccagaaaagatgagctgagccagtccagtgtaaaaaaaatggcccagccancccacagaataatgagctgaataaaanggttgttttaagccaaaaaaaaaaagggcc

SEQ ID NO: 1345 - DNA, 149 bp, Homo sapiens
  misc_feature 116, 120, 122, 134: n = A,T,C or G
gagtggaagcagcctgaggccctcatccaatgcagatgtctgtgccgtgcgtcttgtccagcctgcagaaccatgagccaaataaacctcttttcactacccaaaaaaaaaaaggncagngnggccaattcagnttggacttaaccagg

SEQ ID NO: 1346 - DNA, 407 bp, Homo sapiens
  misc_feature 185, 194, 197, 223, 240, 242, 247, 252, 253, 269, 280, 285,298, 303, 325, 335, 348, 352, 383: n = A,T,C or G
tatatgaagaaatctggcctcccacagagacggatttggaaacaagaggactacacagaccctctgacagtctcttgggggacacaatggcttgccaagggatccttgatacacacttcgagaaccacttgcatagaccatcaccatcatcctggaaggttttttcaaaaaagaccactactctnactttcttnaanaataacattgccttttcttgatcttnatggatggggaatcatnantgacntgctnntttgaaataaaggacntttgaaaatanaaacntggacctatgaanatatnaatcggatgaagattctgaagngccctgatgntactatttatggnctgnttaaatattccaacttaatgggaaggccctnggggggggatttggccacccttgg

SEQ ID NO: 1347 - DNA, 363 bp, Homo sapiens
  misc_feature 30, 135: n = A,T,C or G
gatgctgtcttctgatgaaaacagaatcangaatgagtgaaacatggaagtttgaaaagagtgaacatcaacactggaaactcaagagtgtgttaaacagagaaaattaatagaaaccaggaaacacttaaggtntatttgaagtttgttgtcttgaattgatgtattaattaactctggaatcaatttactgtatttggtgaacccagctttcagtggagttcttcttaattttcgcctactgttctacttgttccaaatgtgtgtatcatgtattttttcttttagatttttctacctaattagctttgattctgtcatcaggattgattttggctaaaataaaacacatatatgtctttt

SEQ ID NO: 1348 - DNA, 383 bp, Homo sapiens
  misc_feature 120: n = A,T,C or G
gacttgctgtgctcagatcctccattcaagagagctacagacacgggggtgctggtgagcaggagccgagaccatctggggtgggaccgaccaagagtttgaggtgtccagggggtgacngtgaagatgacctatcgcagagggtcccttctcattcacgctctgaagtctgcacaggggcaggggctaccgtgctccattcagtttggcctctgttgtatcagccagaggccagcagaactctatggtcactcccccgtgtcacggacaatttgccacctccaccggcagcccagggctctgcctgaatattctcgcctgatcgtaggattgtggggagggatattctcattgatctctaaagaaaatattggtcgcttttt

SEQ ID NO: 1349 - DNA, 479 bp, Homo sapiens
  misc_feature 381, 442: n = A,T,C or G
gatgatcattcttgaaaccagatcccatatcaagagaaagtcaagtaatcatgaagagaggccacatgaaggtgttctggccagcagtgccagctgaatctcagttgcaagccagcatgaccaccagacagggaagtgagcaaaccttcaacggaggcaagccccagccttcaaaccaccccagccgatgcatggggcaaggacgagccaccactggcaaatgtgcccaaactgcaggttcaggaggaaaataaatgatggtggtgtttccagtcattaagttttatggtggtttttaaggcaaccaaagacaactaagaacatttactctggccaataaaaaaatgaatgaaagtgatgtgtcacttccatgtggaaagngttcattcgccagtagttaagacattggaagcaagcttttccttcttggtgcaccaattangaaaagaagtggtgttgggggatgtgccctccttcat

SEQ ID NO: 1350 - DNA, 614 bp, Homo sapiens
  misc_feature 51, 75, 117, 144, 160, 180, 209, 224, 240, 251, 261, 267,289, 298, 300, 304, 309, 314, 327, 343, 356, 365, 374, 383,396, 397, 405, 443, 448, 461, 502, 515, 534, 572, 579, 594: n = A,T,C or G
cagaaactgagcccaggctctaccgacctttaaactacaacagagcttttnaggagaaatgcggaagagacggcntttccaccccgggaccttaccagaaaacccgcacaccccagncacaattggcttccttcattcaagccnagaaaaagggactccnacttttcaccaccaggggangcccccctttcttggtggcttgggccaanttgcaaaaaggcctngtttcattgggcattnccacaagggtngggggggaanttgggncccccaacccttcctttcttangcacctttnanaagnggttnccttnttgttgggcaagnaacaacccaattggcnttaagggttttcntcttttttnccaaacttnccttgtttngggtcttggggcnnaaggtggnaccggaatcaattcttttccactttgccatttaaattnaagtnaagttcaaccccngaaacaatttccttaataccttggggccccccccaaatttnctttttttaaaanaaaccaaagtttgggcctntcccccccacttggggaaatttattttctaaaatattngggaacnttagaaattaaaaanttggaagaaactttggcccc

SEQ ID NO: 1351 - DNA, 380 bp, Homo sapiens
ataacatgtttcaaagtggcaaatttcccctaagaattggaaaaatggataatacggattggggttggagagcccgggattctgattaaacatggaatctgagaactggcagaaagcctggaactgatggaagagagggctctagggcctccatactaaatggtgaactaggaactataaaagagataatgtggtgaagagcttcagccatcaagttattctaaaaatgaagtagggcattttatatgtggagagaagggcactgattattatctgactattgctaatatgtcccatagaacttatttggaataattttttactattaatttgaacaacagcagtgagactctttatatgtataataaagctaattttac

SEQ ID NO: 1352 - DNA, 373 bp, Homo sapiens
  misc_feature 344, 346, 349, 351: n = A,T,C or G
gtcagatttcctgcaaggaggatctacaggggcccagcactaccttgaaggccgtgaacagccacagagggaaagccgccttgagtatggagcaagacttcctcagacaggtctcatttgtgtcttcccttccagcaggaggaagacagcacctgcccagagtagttttagagggcactgcactaaagaaggagaactgcaggggaagatcgtgccctaatggatgaaacatttcccaaatggcctggctatctggagagatgaggacttgctcattagtagaagtttccaggcaaagcctggataagcatttgctgcaggggtgggggaaggtgaaggttganangananctctaagatttctttgccttgg

SEQ ID NO: 1353 - DNA, 405 bp, Homo sapiens
  misc_feature 354, 367, 388, 391: n = A,T,C or G
gctataaagacgccttgaatcctcctccacgatacccgccccactatttgttggcacagctacgatgctgcttatggattgttttcactcctaaagacagtggcgcaaggcaaggtgacctggagcgaggccatcctgagtgcccacccagcgtcccaggagcctgttggaatttggaaggacatttgcctctgtttataaagactggctttttgctgaaagccagggtctcaaaaattttgttttattaatagaagctaaaccccaaacatttggctctttttcattccatttcccctttcacaatcttaactattcccaagacaatggatacctctgcctgtatcaagggcngattgtcaataanaaagtcaacaggaaataaacnttntttttttcaaaatt

SEQ ID NO: 1354 - DNA, 464 bp, Homo sapiens
  misc_feature 14, 19, 24, 27, 34, 36, 47, 82, 381, 415, 421: n = A,T,C or G
ctgatttaagttanttccnggggnccnaaacctngnaaaggtttttnattagggcagcaaagggaaccggggaaccactgangaggagcagcagaaaacttcacagcttctttgggtgggcagcagacttcagatttactggaagccaagaaaggggaagacagcagcaggagggcttgaccagctagctaaataagttaagccatggaaagaagcagaagaaggaagctcaagaaatctcagcaacaaacactcatggacttttttctaaaaatggaaatttaaaactttctcgaccatgacccacaagaaatacattttacacgttgcatccaggacatagcaatatgcctgtgagccactttgtgggtgaagggtttncatggtgagcttgtttaagggaacatggcccccnggggtnctccttttggagattccccctggatttactggatcaaagtctt

SEQ ID NO: 1355 - DNA, 446 bp, Homo sapiens
  misc_feature 407, 413: n = A,T,C or G
ggaaatgccacaagactatggccgtgcaacatttccgcagtgctcctcgctacaaagacattcccctaaggctggtgggcaactcaacactcagctcagtacgtggtcagctcgtcctccataggagccttatgccttggtgaggagatctctgaagaaattgctgatgaaagtccaacaggctcttccagtttgtctggtcggtcacatttgctgaaacctggaggaattgttagtggaagctcaacaggcctgactcagtctgactgtccattcttctggaagctgcagagaaaagaaacctggaaaccctatatgctgacaaaaagggacacaattggatatgatggttattttaccaaggttttgaaatgtcgtgctttcaaatataaacagactgctttaanggatcnaaagtggccttttaaagccaataaaagccctgc

SEQ ID NO: 1356 - DNA, 446 bp, Homo sapiens
  misc_feature 347, 356, 391, 393, 397, 398, 405, 421, 430, 433: n = A,T,C or G
cagcccagacgtggtcaacaagaacactgagcagaaaaacaaccttgaggatgaaaacagggatgttctcagttgaagcccacactagaagagctatttaaacagcaccaaagtgctgggattacaggtgtgaaccgctgtgcctgacccagtgtttctaaaatatctacaaaaacagtttggagttagtcctaggcaatgctttgctggaaatgggatgtgtgatggaccattctaagggagctgaactggctgctgtgaagacatcaggaacccaagtgagactgtggtacgtaagtcaggaagaaggcacttgcctggttttgaaaacatgtcctggggatggntagtgcctncagttcacaaaaaaagcaagctgccttgttagggnangganncaaccanttgaaaacacctccantactgccantanaaacagttgattt

SEQ ID NO: 1357 - DNA, 450 bp, Homo sapiens
  misc_feature 402, 409, 415, 418, 427, 435, 437: n = A,T,C or G
aggctgagaagtccaagatcgagggatctggcagcagatgagggcctttttgttgcaccagcccgtggcagagggtggaagggcaagaggacaagaaagaataataaatcaaacttacagcctcaagctcttttataaccagcatcaatccattcatgaggatggaacactcatgacctaaacacctccctttaggctccaccttccaacatttgttaaattggggattaagtttctaacacatgattttgggcgggatacattcagatcagaccaaaagggcaaagggattttgtatacacagagaagaagttgatgtgaagatggagcagagagccgtttgaagatgctagccttgcgactggagtcatatggctacaatccaatggatgctggtaaccnccaaaanatgganggngcccggacnaaaattcncncctggaacctcca

SEQ ID NO: 1358 - DNA, 460 bp, Homo sapiens
  misc_feature 354, 393, 414, 437: n = A,T,C or G
gtccttccagaagagcactccccatcaacccgcgggcagctgaattcccacctcagactctgctccaagggcgccgtgtctacggaggcgacgctgaggatggcttatcaggttgggtcactcaccccaccacgaggacctgaccttaaattctcggtgcatcctaagtgtgacccagagaccgcctgcgtcagaagcacctagaatgctgtggaagcaccttcaatgcagattcctgggcccaaccctggttccactgaatcggggtcagctggtgggcccaggaattggcattttcaacagcttccaattgtacaccagaatactcaagcttgtgactcccctgctcactgntttcttcatcctttctcacttcctgctgagtacatatgnattttactacttttaaaaganacttttaccaataaaggccggcnttgaaggggaaaaaaaaaagcca

SEQ ID NO: 1359 - DNA, 419 bp, Homo sapiens
  misc_feature 52, 58, 59, 384: n = A,T,C or G
gaccgcaatgctcctacgatgatcctgtaacagaggtatcggacaccaaccntggganncctccttcaaattatgggacatcaccaacaatcaatcactaagagaagaaataatttagaagaagaattcatttttggttactcaaatataacccaatttaaaggagactgttatttctcttctctagtaagctacagacaggatctgctccctttaataagatgcttggttaataacatttatttacagagtaaaattttctctttatttccctccacactaaaatatttacataaactcaaaccacttatgttgcctattccaaccagtttcttgtcagagtgagtaggaaaattcttcattaaatgtcattgcctttggggnaaacagaacataaattaaaaaccccgctttattta

SEQ ID NO: 1360 - DNA, 455 bp, Homo sapiens
  misc_feature 83, 196, 381, 400, 404, 426, 436: n = A,T,C or G
gccaagagatgcaaaggattaatcatgaacccagttgcccagaggtggaaaaaaaaaatctgttgtggtagactgaagaagcnagaagttatatgaacaccaagaggccggcaacatgagtgtggcctgagtctgacgccttcgcccaccctcttccagatcacctgatccgaaagaagttacgaaaatagctcanaatctgggcctgcctggaagagacataaagattcatttacatgggaaggtgactgctctgaatatccacagacgacgaatctatgctaatggttcagtctcccacaaatctgggatttatataactggctcctacccttgttccttgccagcagaaatgcttgaattatcttaattccagaatgnaaattattcccattctganggcntcatttttaagctggcaaaggncatttttttnacaggcctaaaaaaaaatt

SEQ ID NO: 1361 - DNA, 465 bp, Homo sapiens
  misc_feature 28, 341, 371, 398, 415, 436: n = A,T,C or G
atgatgtcagaagtggggtgcaaagtanaggcttctgacaacccccgggagtactgagtgaacaagcaaggtatctgcagaacccacttgtgtccaccgatctctcagagtgcctggagatcatggacaacagaatgcagtgtgagggatgtcaagtcatctgggaacaacactttcttaagaattcatctcaatttctgcgttttttggaaaggtccttaattgtttgctgcctctgcaagctagacatctctttcagcaaatggagacccagatggtgaggcaagagaaggaatgaccaaattaatgaaaatgttctttcagcttgttattgagcttgntattctcctgaatgcttgctctgcgactgntatgctaactgaccctgtgggtaaaangagaaaggaatatctcntttggttaatttaaaaaatantaataattgacaaaaaaaaaaggcccccg

SEQ ID NO: 1362 - DNA, 332 bp, Homo sapiens
  misc_feature 261, 277, 294, 296: n = A,T,C or G
gctgtaggatgacgcatgatgcaagtctgaagttgtatgtggccatctttgccaccacattcagaaagcttacctgagaatgaagtcaacactggagagaaagagaaagaaagagggagaacatatcagaatctctccacaatggcaacaaagatggtcactagcaagtccaagcctccattctctttaaaacttgcaatccttgaggacaaagaaaaacgatctttttttccaatatctatgttacttctaaaagaaggnattaaggaaagcctgnatgaaatttcattcatnantcaagaccatactggccttgaataaaatttataagc

SEQ ID NO: 1363 - DNA, 293 bp, Homo sapiens
  misc_feature 240, 243, 271: n = A,T,C or G
ggagatcggttggaaagacagtggactgatccaagagcccagtcttgatcagcccagactgaggggaccttaagagatgggaagactgacatttacaacttccccaactggccgtgatgatcttaagtacagccactgaggaagccaacttaagaatctcttcctgaccctgctcagaattctatcatccttcttcctgccccaaataaaattcccacttccacaaaaaaaaaaggccancgnggccaattcagcttggacttaaccaggntgaacttgttcaaaaggggggg

SEQ ID NO: 1364 - DNA, 466 bp, Homo sapiens
  misc_feature 161, 400: n = A,T,C or G
ttgtgcgtcactgcaagactgcatggtaatgaagccaaggcactgtgggccaaaactctgctgcctgtgagaagagaagggacagcggcttggagagacagaacggcaaaaccgctgctgctgctgcttctgcttctgctgctgctgctgctgctgctgcntttgcagctgattgagacactatgttgagtctacaggattctgtgttttttgaaattagcataaagtccttgttaaagtcctggagcagcagctgaagccaagtaggctgcccaggcagtcagaagaacagagcaggtgaagctgcacagcatgcagtggtgtgtcttcttttggggccaagcctgatgcaacttactatttgccaacccccggtcatcttccttctgagtaaatggcnccactatcctatgagtgattcaagtaaaaatgctcttcagcgccagtcagcaaagtaaataaatca

SEQ ID NO: 1365 - DNA, 283 bp, Homo sapiens
tcacgaacaatctggatttcatgtcacaagaggaaacagagtcatcacttcaagtactgcaccaatcaagtctgttctggtaataatgtgaggcatgcctcaagacctcgatacatgaaagcaattactgcagatgcctggctgttggcactgttcagctttaatgtagcagtacagaaagttatgccttccacctgtgatgactgatcctagaacctgcagacaatgagtctaagctgaatacaaacaataattatccaagtaaagagcccttgttcaattc

SEQ ID NO: 1366 - DNA, 407 bp, Homo sapiens
aaatgaagatggcatatggaaaggcgattcttatactcagaaggaaaagttcccatggaagccatggattcattcatgacaaagtgggtggcctgtttgtttgcttgagattggcaaaaatccaaaatgtctgtgcacactgctggtgaggctatggtaaaacaattacatatttctggttggtgtgtccttgtgaagtgaaatttggcagtaagtaacaaaattactcatgcatttcccacggatcagcatctccacttgacataaaataaatgctagagatacacatctacaggtatgaactacaagttctgtagtatacaaggatacaggtaatttattctgttgtctatgatggcataaacagcttaaagtgcttattaataaggggcctgggtttgttaaag

SEQ ID NO: 1367 - DNA, 466 bp, Homo sapiens
  misc_feature 384, 410, 415, 422, 425, 433, 436, 447, 451: n = A,T,C or G
agcatgctggacagcctggagctggagcccacctacaaccccttgcatgttcaaagccacctgtactcacacctgagcagcatctatgccaagcctcaggggcggctccacccacactgggagagccgagctccgagaaagcatccctgcaagactgggcagttgcagaccaaccgagctcgagctactgtggcccccctgcctatgactcctgtcccaggcagagcctccaagatgccagcagccagcaaatcttcctcagatgccttcttcctgccttcagagtgggagaaggatccctcaaggccctaagtcaccagcaccagagcccagctgcccagcttaaccatattcatgctcaggttcacataatgggctatttgnggtcaagacttgcttttttttccccnggganccttttntgngggagggnttnattgggaaaanaaanagcctttccttgtcc

SEQ ID NO: 1368 - DNA, 475 bp, Homo sapiens
  misc_feature 397, 404, 406, 407, 426, 428, 447: n = A,T,C or G
ccattcccaaatgcgttacgtaggtggaagctgggtgagtgtcaggaaactaaactctgcaaaataagatgacaccctcttggaagattcggaaaagtgtatcagacttcaagagccagctcagctactacttcaagctaacctttcttgagacctcccctttacctgctttcatctgtgctgcccgttgacttaactgaatcacctagtggactgaatctggccaaactccagggccacctatcatgagcagccttgtttgctggcaatttgcagagttgcaaggggtaaaggactggctttgactattcagtctttcagttcatcacatcttgcctggatgactgcagtggccactaagctggtcacagagtgagctttcttaaatgcaagtgtnaaggatngnnaaaccctcaaggggctttnantttttccaagggccctgtnccttggaggggcataccattgaagggta

SEQ ID NO: 1369 - DNA, 466 bp, Homo sapiens
  misc_feature 42, 71, 95, 204, 229, 264, 298, 300, 310, 319, 346, 347,361, 390, 426: n = A,T,C or G
ggctgggacgatgaaatgtgatgggctgggaaactcaagccngcccccaggtgggaatcaataaaggggancgggtggtctttggcttattggtntggcccaagcctgggtcttcaaaacctgggccctggaaatcaaatggctttcccaccctcaagcttggcccagaagggaaacccgggggaattaccagggcccttgaancccactggcaggcccagcccaggtnttggttaattttttaaatggtaaaaattctttaantaaaaacaaacctcaagggaagctctctttgtcncnttttaaaaancccattttnaaactttcttgcttaaatccgggaagnngtaatatttcaagnggcaaacttttggaattcttgtggcctcncttggggaatgccaattcccttcaaagccttgggcncccaaaaataaaaggtcttcccgcttgattatttaaaacc

SEQ ID NO: 1370 - DNA, 475 bp, Homo sapiens
  misc_feature 392, 398, 403, 407, 410, 420, 456: n = A,T,C or G
aagccaaagattttgcagaatcaaggatggatggagtatcaaaataaggaacggaaaaaactgaagatatactaaggattaaggcccaggttcatctagtgtccccaggtgccaggcattgtgctgtgactgtgatgtgaaaaaagaggccaggacaactgggtctcattcagtcagactggagtgcagtggtgtgatcacagctcatgcagccttgaccttccagactcaaacaatcctttcatgtagctgggaccacaggtgcatgccaccatgatcagtttatttttaaattttttgtagtgagccattgagtccagcataatccttctaatttagttccttatctgaaaagcgaggacattgtgacaatgatctcagaacactgttgngaaaantaaantctnaanataaagggtnggggcccaaaaggctttaattggaagttggcttaanctataaaaaaaaaagggta

SEQ ID NO: 1371 - DNA, 387 bp, Homo sapiens
ccctgaaggaggtgctccagcggcctgctccgtcctgtcggaggcttcctgaaggcctgtgttctcacctgcccttagtggaaaccttctattcatctgatctattttcttgtgggtgtcagggcccacatgtctccatctccctttccagctccaagatatctgttatgggctgcattgtatctccacaaaattcatatgttgaagctgatatgatttggacctgtgttcctgcccaaatcccatgtcaaacgccatgtgatgtgtgctttccctttgccttctgcatgattgaaagtttcctgaggcctccccagaaccaagaagatgccgcatgcttcctgacagtcttcaaaacgatgtgtcaattaaatctcttctctttac

SEQ ID NO: 1372 - DNA, 462 bp, Homo sapiens
  misc_feature 13, 31, 33, 35, 39, 42, 45, 49, 55, 61, 380, 391, 394, 402: n = A,T,C or G
gctggagtgccgnggcacgatcttaacttantngnaccnttngcntccngggttnaaccanttttcctgtctcagcttccccagtagctggggattacagcgccctctggtaggcattgcagagagaagaatgcaaattaaataagaaaagccctctgcccttcaggagcttttggtgaagatctcttttttaaaaagctgcaagactgctgcccgaagtgggacacacaacctaaataagggcgagaaccggcaaggacggcccagccacgtggaaccgcctcgcaactttggcgagcaacttgagatcttctagagacccaggagtatgttgcttctacctcagactggggagaggggagcttccccaaaccattggngggagatgaanatntcaaccanccgaattcctgttcacgaccaacctgttgtgagctcttctgggggatcaacaatggctga

SEQ ID NO: 1373 - DNA, 263 bp, Homo sapiens
  misc_feature 7, 21, 22, 28, 31, 32, 34, 41, 43, 52, 54, 61, 69, 85, 90: n = A,T,C or G
ttttctntatgaaaactactnntcacantcnnantcctttnangttaaaaantnaaagggnaggccagncccgggggttcacccntgtantcccagcactttggaaggccaaagcaggtggatcactggaggctactttttgttccttcaatgcctattcattcgtctcctctactccccgcttccccttccttcatacaccaactcagagttcgaggcacctgcccatttccttccaaataaaactgtaaagaggttacaat

SEQ ID NO: 1374 - DNA, 230 bp, Homo sapiens
gaagtcaagttgattacttggcatcagcccttcatcacagatactactgaaataaaaaaccaagggaatgtgaaaaaaacggaaggacactgaagcccgtggggaaataatgaagtataagtgcttcagagagcagcaagaaatggaataatatttcttctgtgaggacctcagtaataacaacccatgagtgatgggacttattgcaaatggcaagagtgctgttggag

SEQ ID NO: 1375 - DNA, 338 bp, Homo sapiens
  misc_feature 1, 5, 8, 9, 18, 21, 30, 44, 49, 57, 69, 91, 102, 113, 125,126, 132, 200, 206, 219, 234, 241, 247, 262, 324: n = A,T,C or G
ncatngtnngggagttgntgnaaccactgnctgactcttcatancaccncgcttttnccttggtcctcnacactgggtggggagccctacnttccatgaagncttggcaaacngggtggatcggnntctgcntatcacagccatacaatgactcttcaggaggaaataccagcctagacctgctcagggcttaccaaacngtgacnataggtgaggtgnagccagactagactnacaccanttcggnatgatctgacggaanggccggcagaccctatatcctcagatgtgtccccatccacctggcacatgtctggaacttcncattacagaggggg

SEQ ID NO: 1376 - DNA, 412 bp, Homo sapiens
caacctcgaaaatgtccaactgcaaagacccatgtctacaaattgctgtcagccagaggaatggctgtaacttccttggtgccgaggactccctgctcagttcctacttacagtatctgagtcacttaactaaatgcaatcggcccagctgcaggcaccactgctcgggccactataagaaccagcccctgagcttccggacaggaaacagcatctgcatttccagactgtagcagctcatcatgccaggctccacaggcaagaatcaagcagatggaagctacagaggaaacaaacagggttccctgaaatcagcagctggggagaatttatcttacaagggtggaattcttgattctttcattacatgtcctcttgcagcagcagcaaaagtaataaaaaataagagccc

SEQ ID NO: 1377 - DNA, 416 bp, Homo sapiens
  misc_feature 363, 388, 389, 391: n = A,T,C or G
ctcagggccctaggggagtcacaaaagatgaggacacgtgaagactacagctgcaggcctagaagactctctcaagaacaactgtcttggattcccacagctttcccctttctgtggtcaccactcaggactccctaccctgccccacaagcctgcagattctgagatgacctggaaggaacggaacaggaaggcgtgagctttggcaccagtttaacgtagaactgtacgggccaaacacagggcctttgattatagaaaaaaataggcccattgtcttggtgggtggaaccaaagcatagcagcatctaagaaaccagtttctttgtgtccagtgatgagggcttagccctaaaatattanggtggggagggaggaggggtgaaanngnaaacatactttaataaaatagatta

SEQ ID NO: 1378 - DNA, 253 bp, Homo sapiens
tcaacagtcataactttttgaggacacatgtttattgctgctgctgggggcagctgctcttgtacccactttcaaatgggctgtggaagagacaaagctcatctggctgctggggcagtggcatcctcatgcaagctggtctactggtggctgcccctgtgacctgcttctgaatggccaggcaggaaaagtctcccactgtgttgcatttaaagaaaagaaaaagatgaattaagtaaaaagctctgcaaac

SEQ ID NO: 1379 - DNA, 303 bp, Homo sapiens
gctgaaatgaaccaacatcagcagaggccgcggcagagtgagagagctgcccatgctgggagaagccctggtctttgtctccacaaatgctgaaactgacagtgtttctcccagagtccaagtctccattagccaagccaagagcagaggaaatgttctccactggaggaaagaagaactgtcgacaccagaaaatttcctgctggaattctgccaaagaatagctggccgtcctagggaggtccatcattacggaactttgctgtttgtaaatttaataaacgactcacatctgcttataat

SEQ ID NO: 1380 - DNA, 382 bp, Homo sapiens
gtgtggagcagagaaaaggctatacccactgatgaacagggatccacacctggggaagaagcaagtatgactttctctcctgtggctttacacaacctccttgaaattccaagagcaaccctcccagctaaagtcttctcagatgtgacacgatctgcacaagcagaggcggcacagggtttggcttccagttgggaaatgaagctccaagggcagccctactatggcgggctgtgtgacctgggccaagccccttgacatctccagactcggcttccacatctgccaccaccaggacactggattgaatgttgggtacgttgtaaggcaagggagacacagaagtcctaaaggcaataaagcttttccccactgcccctcc

SEQ ID NO: 1381 - DNA, 364 bp, Homo sapiens
agactgggtctcactacattggccaggccggatttgaattcctgggctcagcctcccgagtagctgggactacaagcatgtaccaccatgcccagttttctgcagcagtttttataaaccaaattttccaaattagaaagactgaccaaagaagcacttttatacgaggaataacttacgtatggagaatctcaacttggaccagtcaagaccaactccagcgatgaagccagaatgtaatatatctcaaaaggctaaagaagtccattttcccagatgtaaattataattaaaaaatagtgagccaaactctaatatcccaatgtgataatctttcaaataaaaatatgggctgtagttcagg

SEQ ID NO: 1382 - DNA, 318 bp, Homo sapiens
aaatgttaagggagttaatcttctacaagtccagtcatgtgctttcacaaagggccaagaaaggagtcccaaagctcgccatgactcaacaggaagctctttgtgtcttcctttctacaccatgtctgacaaagaagctgtcttaagttcatgggcctctgtctcttgcgtgaattctgaagtcagtgaagcaacaatgatgtcattgcttctgaagaccactgttggctgagataatgaagatctcttcacccaaaacattgccatttctgcagcatacatttcctaccctttcaaatacaaaagtattctaccgat

SEQ ID NO: 1383 - DNA, 463 bp, Homo sapiens
  misc_feature 247, 271, 272, 293, 308, 336, 337, 343, 344, 348, 355, 359,374, 377, 379, 381, 382, 387, 391, 397, 401, 406, 407, 418,422, 424, 436, 437, 438, 442, 447, 450: n = A,T,C or G
ccagcagacatcaaggacttctgaggagcctggtaccttgcataggcactatggaccctgttttgcttaacccacccaacagccaattttagcagacatcctagttttgcaggtgagaagagctgaggtacgaagaagttttgttaatttttccagttcacgtaacaagtaaatgggaaaccaggatgaaaatcaaggtttatctgtcgtcagactgttactcataatcaccattcggagagttcanatgtgggacaagattctaactccnnccttctcccaaatggttaatntgccaggtgccctanagctacatattgtcttatttgtgtgatnnactgannctgnctgaatnttanaagccttgtatcttntgnantnncaaanacanaagagnccgnggggnntatttaaattngaantnaaccggcctgannngccnaaaanggnggggcttcccagg

SEQ ID NO: 1384 - DNA, 220 bp, Homo sapiens
gtggggtctttcagtgaggacactcaagcagctctgtggagaggaaccatcttgccagctccaacatgccagccatgtgaacaagcccaggtggcaaatcacccagcctcagtcaagctttcagatgaccacagccccagttgatatctgactgtaaccacatgaaacaccaaactctggactcacagaaatcatgagataataaacaatgattgttttg

SEQ ID NO: 1385 - DNA, 434 bp, Homo sapiens
gcaaagaaacaaagaggaaggtgtggatgctcacccagaagtcttgtctcctcgcagtcccttagaagctcaatcctcaggagacagtgcactgggggttgccaaggggacctgaaataccggtttgccacaatcctgaccaaatcggctcccagggctgagaagggagaaggtgtcagtccattcaaaacccatcgtggctgattttgaagtggaaaaagaaaaaaagaagcaaagaaaagcattgctcagcaatgggcaggaagaagagttaagaggctgagctcttcggcaagaaatgccatagctctttcaacttggacagagccaggaccacaggctggttgtgtcaaaaactgggtgttcttgcttagtgcataaggtttggtggttttcctccctctttccttgagccctggcacttggggaccctg

SEQ ID NO: 1386 - DNA, 268 bp, Homo sapiens
attgtgaatgccagcagaacagctgaccccaaacagcttgaagacccccacaacagaactgaatcagcatgaaaatgcagtttctccacctctctgttccatgacttcaccctgcactcttccaccaatcaatggtctccacactttggtcgacaccaaaacgcttaagaacccaaccctagccccaaattccttggggagacagatttgaggagtcctcttacctcttcatttggcagccttaaaattaaaactctttctttgcttc

SEQ ID NO: 1387 - DNA, 542 bp, Homo sapiens
gtgacatggcttacaaggctacttgtaatcaacttctcatggctcatccccatttgtgccctgaactccaaacgtactgagttacctgcagttcctgtaatccagcatgactttgtcctccaagcctttgctgtccccactcatccttcagttcctagctcaggaatcatctccatcaaggtttccctgacttctcccatttcccaagtgaggcgttcagagagtcctgtgcttacctttggggtagcacttacatcctgctccctaactgtctgtagaatcatctgtcttcgctgtctttgagcaccctgagggcagggactgcagctgttatctgggtacatacaacaccaaataacaatgcctaaggcatgccagatattcaataaatgtctgtgtaagaagcaaatgtttaaacatttccttccccagcatgccttctctgactatccccacctccttccagaagtactcacctaatccatgcggacaccatagaccaagtgcatttataaaactggtttataatattaaatgggtag

SEQ ID NO: 1388 - DNA, 282 bp, Homo sapiens
  misc_feature 6, 9, 18, 20, 21, 22, 24, 25, 26, 27, 28, 29, 30, 31, 32,33, 34, 35, 36, 37, 38, 39, 40, 99: n = A,T,C or G
gtatantanttcttatangnnngnnnnnnnnnnnnnnnnngggatgctccttcctggacccagccacccactgggaaaagcctaagccacgtggagcanctacatagaagagggccggggccacagctacagccagcagctcctgccagccacgtgagagagctaccttgatgttccagcctccagagatctaagagcttccagacatctaccaccccagccacaccacctgagccaatgtcccacagagtcatgggagataataaaaggctgttgttctct

SEQ ID NO: 1389 - DNA, 263 bp, Homo sapiens
aggcaagttctccgttgcccaagctggcctccaactcctggctcaagtgatcctcccacctcggcttccccaagagatggggttacaggcatgagccactgtgcctggcctcacaagatgttgttatctttgttttacactatcaatgcccatgcgtccttacttaattattaaccactgtattgctgttcattcttcctgcatctcatatcttccatcagggatcatttttcttctacataaaataaatcatttgtaatttc

SEQ ID NO: 1390 - DNA, 292 bp, Homo sapiens
gtaatgcttgtggtgttccagacagcagaatgtgagtgggacatcatatgtaccacctctgggcctggaccatagaactcacacataatccttcatgttcttatgtgaccacacagatgaacaaagcaagccaagtgtggaaacgtgttaaagatgacggaaccacaagatggaacaagcctggatccctgaatccctccttggaggattagtgcccacaaattgtaaacagccacccagatctcagcgagcaagaaataaattatacctgaatgttttaaaaaaaaaaggc

SEQ ID NO: 1391 - DNA, 244 bp, Homo sapiens
gattgtctccaatttacctggaccacagccagcaccgtatcctcaggcaccccatgggacagtacatacagaagaacagcatcacaccacatcctatcaccaaggccaggattctgtgcctccgcccccctccccacctccttgaaacgggggaagtagggggaagagtcaattcttcttggagcacatgagatggtagcttgctgtgttgtcctgaaagaaaacaaagtttgtaaatcactgt

SEQ ID NO: 1392 - DNA, 436 bp, Homo sapiens
  misc_feature 383: n = A,T,C or G
ctgaggaatatatgattggtttcttggaacaatttcacagctggcatggaactgaaaccctgctactcaggggaaattaggatcagctcttgtccagttcaagctgactccactgagcctccaatggcctgtatgaatgcccaatgagtgcccttttgacatcagaaggccaaaaactccaccctcagattgtgccaacgacaccatcttgcgaacgtggatcctatgaaaagccatgaagcttaactgcactcgcacagatcagcaattacctcacttttccttaccaccaattaactttttccatgcattggctgccttgcttctttattccacaaaaatccttatggccccactttcaaggagggagaaatttgaggggngttatcccacctcctcacttggctgcctcatgaataaaatcttttctccctgc

SEQ ID NO: 1393 - DNA, 178 bp, Homo sapiens
aggctgttgtgatatcctgcatggacaaggaaatgatgttcatctaatacacccacttgggaacactttgatgcattggctatgattgtctttctgttttccctaccctcatctctagccctgtcccagtatgagaacatggaaactcattttggaaaatgtgaaatgagtgatcccc

SEQ ID NO: 1394 - DNA, 263 bp, Homo sapiens
attgatcgcagagttgaacaacagagaatgtgtgcacagtgccaggcacaggtgtggtcaagattcacctgggagaggaagtgggcaggggcagaggagtgtgcccacctgagctgaaaggctgcatggcaggtgaccattatcaccagtgtcgccagccaggtcacctctctgaattttgtggttgcaacctccatgattccctagagctgtttttacccagaactaatgaaaaattctgcacattaaattcatgctattag

SEQ ID NO: 1395 - DNA, 267 bp, Homo sapiens
ggcccctaacagtgtcataggcctgatggagcagcggaacctgcctgagggtaaagctgaagttcctcagaaaccagacggccttacagcctcttcactgctctttgagatggaagagaagaaatgcagatgagtgctttctgctacaaatctcatctctccaagctgaagttgccaaggaacatgccatcactgtaactgctaaaaacacaacgtataatgaaatgcatcttctacaaatgaatctgtgaatacagaatagcctac

SEQ ID NO: 1396 - DNA, 180 bp, Homo sapiens
gcacacatagttccttttggcgtcttatcttctgaagctgcctcaaggccaagcaaagaaagttgttaaaaagttaagttacttttcacagcctgcaaacccttcaaaggcaagaactcaaatagaaacttggaaaggcagataagccagaaaagtgtactaataaacgcacttaatatg

SEQ ID NO: 1397 - DNA, 428 bp, Homo sapiens
atgacactgtgagaagtcagatgtatcatctcttttgattaccactggttctccaggacctatgtcataaaagattagatcaacctgtaaccagagcctattaagtgatctccagcaactgtctccgagttggaagtgctagccaaagaatttcagtgattgcgttttgtgtacttacacctgtgggaccagcactctccatttaatgagccagctgcttttctgattgcttccccggatggccaagtcactgcagaagtttcttgaaagctcaaatgttgccttttcctaaactacccatggccccaccccacctcatcctgtgcctataaagaccccagactcaatcagcagagaggagaagcagctgaatgttggagagaagggacttgacttcagagggacagcttgatggagtaaccggagaa

SEQ ID NO: 1398 - DNA, 285 bp, Homo sapiens
  misc_feature 8, 16, 23, 26, 53, 94, 96, 122: n = A,T,C or G
aaactctnatctcttnccactgnctntgttattcaagagtttgtttctatggnggagctaatgagtctcatccttgcagctaatcaaatgtacnanagcatcaacagaattaagatggttancgaggtgaggccttgaaatcaacatctccgcctccttgcataaacccttcattgagactcctcttccatttgggcaacttgatgtggttcaagagcatggagaattgatctcttaagactcataaaatatttgcttcttcaaaaagaataaaggaactgaaac

SEQ ID NO: 1399 - DNA, 169 bp, Homo sapiens
gttggagattacatgtctaaatcttgttcacacctatgggattggacaaaattttctcatgaaactaagagaacaggccacagagtgtcttgcaatctatgctgctagcaagtgtctttctcatgcctgatgttatacaaaaactagcaataaaggcttattctttcct

SEQ ID NO: 1400 - DNA, 224 bp, Homo sapiens
gaggaaaggctggaccctgtatttgtgttgtgtaccctcactctaggaggtgtcttcacactaagagatggccactcagcttctggcattatcactctgcatctactttgccaagcttcttcttttgaaacgtcttgtgtaggcagtagttaagaatatgccacccagaagaataccagatgaataaacttacaaatattttgaataaagctcaatctaacaat

SEQ ID NO: 1401 - DNA, 466 bp, Homo sapiens
  misc_feature 78, 85, 104, 107, 118, 122, 123, 124, 129, 131, 132, 135,137, 140, 141, 142, 151, 153, 154, 156, 164, 171, 184, 189,199, 229, 243, 245, 351, 355, 370, 388, 389, 396, 397, 406,407, 416, 424: n = A,T,C or G
gagctgatactctattaatggatctagtgcctaaatcaaaagaacagagagagtctgtataagcaaaattacctgaanaaaggtncgaaaaactggtcccaggnccntaaaatgctgngctnnnaaaangnnatntnggnnnaaaaaaccngnnanccccttcntcccccntccagaaacctanaattnacgttctacnacttccacaacccaattccaacttcctttnttaatatgtgtaangngtatctgccccatgggccttctggatgtgttcatcaattctgaaaaactctgaactcggaagctcagtgagccccagggtttggggtaagatattacggacctgcncttnagccaaaagtgcttncgctcactctactactgnnctactgnncctgacggnngatgtcccncaaagccnccttgctgtggggcaggggggccccctgtcctttttggggaa

SEQ ID NO: 1402 - DNA, 350 bp, Homo sapiens
gtggggtctttcaagctcaggaacaaagccttagtccctacaggagaaaggcaatcctaaggagagcggcgcctgaaccctttcctaccatcaagaactcaagaactcagcctaataaatgtgggcagaattcacatacaccagctccaggcctggcccataacacttcctgcatgatctgggatgcaaacgatccagtggaggcctccgaggccctaaggatgaagcagctggagacagaagggcctgggtccctgaatggctgggaggaatagagccccagtgcagtctacttgcacccccaccttgactctgacataggcagaaataaatttttacactctaaaatc

SEQ ID NO: 1403 - DNA, 133 bp, Homo sapiens
agatgtatcaaatgggagacggccagcagtgatcaagtcttgattaatactgaaaaacagaagcttgtgctcacaatccctgccattacaattctttatagtatgtaagtactttaataaacattatgaagcg

SEQ ID NO: 1404 - DNA, 330 bp, Homo sapiens
gaaggaggatatccctgcgatcaccaagcctctacccttatcttccaaaccagtcacttaccacagatgtcttgtcaagctgaatatcctccagatctgacttctttcctctactggtgctcaatacaagatgctttactttgtcacaagaagcatataataaactcaaagctgcaaggatatatctgtaagggaaattttttcttgatctggctggccttgaacataatcaccagaaagactttttgtgctcagatattatggttgtaaatgaggatttttttcctcacataagaatgtatctagtccattataaaatgttattgatgc

SEQ ID NO: 1405 - DNA, 242 bp, Homo sapiens
tcctgtgcctataaagaccccagactcagctggcagaagagagaagcagcttgactggagaaagatgattcgacttcagtgggacagctagactttggaggacagacggcttaacttcagggaagagccagctagtgacaaccggacttcagggaagattacctgcccaacctgacccctctccagctcccctctctgctgagagcaacttctatcactaagtaaaattttctacctccacc

SEQ ID NO: 1406 - DNA, 289 bp, Homo sapiens
atgggaaactgaggtccgtgaagtcacttgcctggatcacacagctcatgaccagtatgggtcggcctgggacacaggcattctggggctcaccaccaggtgttccacgtgtcaccactagacctcccaaccagggagccctgccgctgccccagcctggagacgtgacacttctcccagccaggaggctccagtgaaaccagggattccccaggctcaccctgactcctcatcttgttaacgtatttaatcctcatcctgtacatgaaataaatatttcatctcatct

SEQ ID NO: 1407 - DNA, 436 bp, Homo sapiens
caaaaggaaagtcacagccagagaacgtgactcccggtgagcctggagccagcgtgactgcagagggccagtccccaggtgatgccggtacgctggagaaggcctgggaagatgtgcggagacagacacctgggacacctaaggaccaagcccagagccacgctgctgctttcccagctgccactgggctgcatgaaggcagaacatctccagtgagttcaacattcagctccaaccttaagcctccaccatggccaagaaaggcattgctgctgggggagaaatggacattaacactgcttcaaaagggtgctgaaaaacacccttcatccccgatggcttagcttgtggaattcacgggtacttgcatctgaccctcatgagtctatgtagaaaaacctggttgaggaactgtttgttgacacccacatcagct

SEQ ID NO: 1408 - DNA, 179 bp, Homo sapiens
  misc_feature 148, 152: n = A,T,C or G
atatgtttgtttattcgaacaggatgcagtccagtcttgctgacttaggatgcagcaacgaggcactatcatggaagtcgaaactgggtcttcaccacataccaaacctgctggtgccttccttgatcttggacttctcagcctccanaccngtaaggaaataaattctttttttaaat

SEQ ID NO: 1409 - DNA, 419 bp, Homo sapiens
agcttgtttgaagtgagtgtggtctttgctcacccagaaacagttgaggattgccacttcctagctgcgatatgcccagattgttttaagccagccaaaaacaaacagtctgtattcactagaatggcagttatgaaagccttgaataagataaaggaagaggatttccttaagcagtttccttgtcctccaaactcaccaaaggctgtatgcgctgttcttgaaattgaatgtgctcatggtgctgtttttgtagctgggagatataataaatactccaggaatctaccacaaactccttggataattgatggagaaaggaagctggaatcttcagtggaagaattaatttcagatcatctgttggcagtatttaaagcagagagttttaatttttcatcctctggaaaaaaaaaaag

SEQ ID NO: 1410 - DNA, 409 bp, Homo sapiens
gaacccagtggctctgagctcagcacgcgatgcacccaggaatgtggccttacgttgttactgtgcccaacctgcgaaaactgggaagaaatgaagaagtcatcctcttcctgagacagagcccagcagccttggggcggctgagagaagatgggatccacgtggcccatagcgcaccccacaggccttttctgggaaagcagtcttctctcggggaagggagagacacctgccgaggacctgccaggggctctcgcactgacgctgctgtccttaatgcctcaacagtacaggcaacatgggctacgctgagcccctgctctcctggaagtctggtattttggtattttggcaggtgccaggcagagggtgcctaagaccagccccataaagtccctgggccttcccc

SEQ ID NO: 1411 - DNA, 443 bp, Homo sapiens
  misc_feature 26, 30, 111, 119, 128, 149, 169, 199, 218, 221, 229, 231,236, 241, 259, 260, 273, 276, 295, 302, 321, 331, 354, 380,383, 392, 417: n = A,T,C or G
gccagcatgcacggcgcacaccgtanctgncgtctggagctccagggttgggggaattgtgttacgcattgcctgtcactaggtatgaggctgcctccgatttccacactnagaatcanggctgcagngccctttgtgcccatggctgntgatgcacacaggattcttncaaaacaagaggccctactctgtgactgtnagccttgccatcaacactnctntttggagnanagctncctgntggccctgaggcaggagnnttctgagatcttnacntatgctgggcttgatccangcctcantacaggtgaagaaacggancctgtaaaantgaagtggcctgcttaagggccngggctgaaagtctgaggcctggtttnaanccaaacccnggcaaggcttttgagaactccaccnttgctgccatcttacgtccagggagg

SEQ ID NO: 1412 - DNA, 96 bp, Homo sapiens
agattggagataacttcaattggattatgcccctggttccttatcctgacacttcctggatgatcccattacaaatacatgtgatgacatctgttg

SEQ ID NO: 1413 - DNA, 306 bp, Homo sapiens
acaggaaatatgctgacacgataataagatgtgagggaggcacatcttaaacttttgtgtgaagacccaatcatcatgctgacgaatcacaaaaagatcagtaaagcccacccactctcacaggtggtgtcactgtggctccatcacatcagctagacctggccatgcagtcccaacttgttacctacagttccagctgccaactcaggccatctcactgaatgaaatacttgcttcaacattgaagatgtttcctctggccactcagaggaaacaccctataatgaacaataaacaaaaggactc

SEQ ID NO: 1414 - DNA, 219 bp, Homo sapiens
  misc_feature 59, 87, 94, 101, 105, 112, 180, 188: n = A,T,C or G
cttgccccccacttcctctctccctctttcctatgggctggaatattgtggatttggantgagccaggttccacaatgcttgatgantacaatnttttcangaanacagcanaacagcatgaagaaaagaaacctggatctgcaagtgcctaagcagtgagcaagaccccaccaacactnggccactncttcttggaccatccttaataaagttatttc

SEQ ID NO: 1415 - DNA, 457 bp, Homo sapiens
  misc_feature 359, 369, 391, 444: n = A,T,C or G
atccatggtccttctcaagacattggctttgttctgaagcagctcccacgctcttccagaaatctctatgcgggactctgaatgtggtcaagaagaagatgtactggatgcacattccctatcaggagtctcttaatagtctcccacccagttacaacatattgctgtaatcccacacaacagctgaaacatcttttcttcatttcttttaattcctgtagcatttgatgtctccaccgtgtaatttacatttaattgtaagttgttttgcatcatttaatagttgtttcaagtatgaatgtcttgccttcccaagaaagattaaaataagaatcctttaaaaacaagagcttactggngccagggccngacttagacttagagtaaaccncaactactggcttcacttcaagctgacctaaccatcttcccagcgaagacggncaacctggaacta

SEQ ID NO: 1416 - DNA, 356 bp, Homo sapiens
  misc_feature 266, 303, 310, 324: n = A,T,C or G
gcccggaaaaatggaggttaacttcattgtcatctgtcatggaactgtggccacaaaaagaggccgtctctcaggccagggtggctccacggtcccagcgacatgcaggggctcctcttctccactcttctgcttgctggcctggcacaggtaatggcaccgaagcctcctttcgctatgtttgaacagcgccacgctttcctatatatttttatagcagagcctaaggcacagcctggcacaagtgcgggaaacaagtgtctctncatgccagctccaagcggaggctcaacttttcattgntggttgncaaaaggggcaaanagcccctgggaaaaaccaaattttgacaggga

SEQ ID NO: 1417 - DNA, 99 bp, Homo sapiens
gttctgtttgggctctctgcttcctcctaaagaagctaccaaactgccacggttacactgttttaatcgccgctcattaaaagaaacactgactgggtc

SEQ ID NO: 1418 - DNA, 173 bp, Homo sapiens
  misc_feature 128, 129, 130, 132, 133: n = A,T,C or G
ggccagacctctgcagaagtggtgtcaatcacttactcctttccataagctcactgcacacaccacttatgacacagaagactctaccaaaggaaatcaaactacagaacagcaacaaaactcaaaannngnncatttggcttttgtgttattaaaatattttctcagcagac

SEQ ID NO: 1419 - DNA, 463 bp, Homo sapiens
  misc_feature 391: n = A,T,C or G
caacaaaaaatggattaagacgccaagagtggagagtccctgcacaaactggattcaacaaggacagaaaggaagcccaaacgctttacatattgcctgctttacaccccaggctcaagtccagaaagtccctgtgatacaactctccagtgatttcccctgaggtccaacctagtaggtgcttaaaaagtctttgttgtaaattaataaattaatccaaaaccaccacactgctatttcctcctacctatcttcctgtgcctatcataagctgtatcacctggggaaaaaacatttttcagctaaatttagaacagggagggttttggtccataattccacttctagtaatagattctaaggaaataatcagatttagataaagataggngtatgataatattcaggcaatggggttttcaatagtggaaaggtgggatcaacctaatttgaaaaatagcca

SEQ ID NO: 1420 - DNA, 474 bp, Homo sapiens
  misc_feature 354, 363, 367, 369, 374, 377, 383, 384, 389, 397, 401, 405,408, 412, 417, 427, 432, 436: n = A,T,C or G
ctctttactggtgagaagatagcaaaagctgaagcagacacagaatccacaagtggaaaatacagcagtgccattaaaggagtgggcatgtggcctatttctggccctatgaagcaaaaggagaggtctgctgggagacttcctgaaactgctcttcctggaaggagggaaacaaacaaaacaacaacaaaagaactttacaagagaaagctttttatcccagccccttcctactcccattgaatgcagctctgtgaggacacgatatttgaagctgcagtagctgaggtggcaaaagatggcagaacagaagagcagacagaatctgggtcctagatgacttcattgcactgntgcaactgncttntncaganctnttggcnnggggnaaaaaatnaaanggcntcnttgnttaancccctggganactanattntgttctttgccactgaatgcatcctaatgctggaactg

SEQ ID NO: 1421 - DNA, 477 bp, Homo sapiens
  misc_feature 6, 9, 10, 25, 46, 58, 61, 78, 85, 95, 107, 116, 118, 119,129, 133, 145, 166, 178, 179, 181, 184, 192, 198, 204, 210,215, 217, 222, 228, 238, 251, 259, 290, 338, 356, 359: n = A,T,C or G
accttngcnngaaacatgaatgctnacacgcagtggtgcaccacangctattgcactnagngagagcccgatttgttngctttgngcccctggantggaatcccagngggaagatngnnatgagagtcnaggnctacggatgttnctataaatcagacgttgctgnctttgatggccnnanctnacttctgnacaggntcaatnaaaagntgatnantactntcaaanatgtgatctncctgaagttcaanatcatgcnaggagatggggtcctgttccatggagaaggnggggggggagaccacatcaccttggaactccagaaagggaaggctcgncctacacctcaatttggnggnttgtagttctccttgaagaggtccttcacatcccttgtaagttggaaaaacattccatgctcatgggtaggaagaatcaatatccgtgaaaatggccatactgcccaaggtaatcttg

SEQ ID NO: 1422 - DNA, 292 bp, Homo sapiens
gtttatttgcaagatgggtttgagggaatcaaggataaagtctgctgaaagtagtaccagcctctggattaaaagggatgtttggatgaagcttcaatctcaagaagaggcaagagaaaactaaagaaaaagattattctacagaaacaacacatcactggatgcctctcaccatgcaatcctctgtgcacttgagaagaagacaagactctcctatttttagatgggaaagctgaggcaaaacggatgcacttgggcaaaatcatttgataaaaatggaagctgaacctcc

SEQ ID NO: 1423 - DNA, 98 bp, Homo sapiens
  misc_feature 14, 34: n = A,T,C or G
agagctgactttanagggatcaagaatatctagntggatggaaggagggtaaactcaaaggacatgtcatgaattcctgaaccacaataaatctgtga

SEQ ID NO: 1424 - DNA, 103 bp, Homo sapiens
  misc_feature 8, 9, 17, 19, 23, 61: n = A,T,C or G
aaattccnnggactaancntgancacaactccatcggctttgaagattctgtgccttctanttctgcctaagaataagaagaacttaatacaaatggaaaatt

SEQ ID NO: 1425 - DNA, 376 bp, Homo sapiens
  misc_feature 357: n = A,T,C or G
gctacctctgctcactctgccctgataacactgaatacaggaactgtctccatcacccagaactcccggaaccaagcactcagcccgacacgtcatacttattaaaaacacggaggtcgtgagtggatttccacgtattgttctagatgatggagaggcctgaagagtgaggagtggggaagaaatgtcatcgctgttttcacctgcacccttgtttcagagaagtgaatagtcattcatctctggtcaacaaaatgataatagtagcagcaacaataatattctctttttttgagcacttcttatgtgccaagtactttatgtatgcattatcataaataaagcttttcaccattnccttaattcttttattttt

SEQ ID NO: 1426 - DNA, 78 bp, Homo sapiens
agaaaagcaatgtcttgcagtttggtgggagagagtatgcagtcaccaacatggcatgaatttaggagtgaataaacg

SEQ ID NO: 1427 - DNA, 330 bp, Homo sapiens
  misc_feature 18, 92, 99, 102, 232, 237, 248, 280, 291, 298, 316: n = A,T,C or G
tgtgagggtgaggacctntcctggctttcaccttcaaccctcacctcacgaaggaggaaggtgcagatactccataggtgcttaggagtgtnagtgttnagngactgctgcaagaaaagaggagatacgatctgatcacttagacttcaaatccaaaccttgaaaagtcccacccagtggaggactcttgccgccttgagagaacacagctgatgtccggaagcaatattgntaacnttaccaataantccaatcaaaccccaaaaaaaaaaggcccggnggcccatttancttgganttaccaggctgaacttgnttaaaaggggggga

SEQ ID NO: 1428 - DNA, 291 bp, Homo sapiens
tgatcctagaccatcccccttcgcccttgttctcaactggctgggaagattcaagagaggcttccaacctgctggcagtgacggatggcagtgcagaggcacacaatggcaagtgcaggcgcgtcaccagccttgcagctggccttccaaagaaagaaccaaagtcgaagtctgtcctgacagaggctgatttaattaaggttatagcaaagggcagaactgcctgtgggctgcattctctgcagagggccaaagacaatgcattaaaatacttctcaggaagaaaaaacc

SEQ ID NO: 1429 - DNA, 304 bp, Homo sapiens
atttctcatggaaaaggacggcctggagcctttgaacagggtctgtgtcttcctcctgtgtcagcaatgggggaggaaaacgagcgcactacggggtaaaggaggtcacccaagatctcaagttcacgagtggcagcctggattcaagtccctgcctgcctccagaacctgagctctgaaacgctggactaatcagaacctcttggccctgaaaaatgaggcctattgaacagagacatttgtaagaaaagggactattacaacctattgtaaagtaacaagcaaataaaaaatgaaatggccc

SEQ ID NO: 1430 - DNA, 248 bp, Homo sapiens
gcgattactttaaaacatgaaagaaattgcaccttttccttaagggcaagatggtgctgtgggctttcctctctcctgatgagatgatgcaaatggactccatagagaaacgctgcccgtgtaacaatgcagttacgcaacccggtgcatgacacatgaattgcagcgcacctgagatcctgatgaaatcctgggagcctggagctgtcaaacatggttttaaaaaataaagggaatacacccagccc

SEQ ID NO: 1431 - DNA, 460 bp, Homo sapiens
  misc_feature 147: n = A,T,C or G
ctgctccgtcctgtccggaggcttcctgaaggcctgtgttctcacctgcccttagtgggaaaccttctattcatctgatctattttcttgtgggggtggtcaaggggcccattatgtctccatctccctttccaagctccaaagatnatctgttatgggggcttgccatttgtaatctccaccaaaaaattcattattgttggaaaagcttggattattggattttgggggaccttgtggttccttgcccaaaaatcccattgtccaaaaccgcccattggtgggatgggtggtggcttttcccttttggcctttcttgccatggatttggaaaaagttttcccttggagggccctccccaagaaaagcccaaagaaaagaatggcccggtccattgcctttccttggtaacaagtcctttcaaaaaaaacgaaatggtggtccaaatttaaaaatcttc

SEQ ID NO: 1432 - DNA, 176 bp, Homo sapiens
tctcagcggatgatcttatctcctgctacatctagaaaatggaagccatcagactccatcttctcaccactgaggctacaaaagatatctacacctgcaaccctttccctttttttcttcttcccttttgttatgatgtataaagtgtcccttatctgataaagagctaatcattc

SEQ ID NO: 1433 - DNA, 301 bp, Homo sapiens
gtgcctcggtatgggaaacttcctaagatgttgttttggctgtaaatcatgcggccctctcagagcaatgcatttgtgtgatttgcccaattgtgcatgagtacagtcagcatggaaatccagttcaaactgcagaagatcagcacctgtgagctgaaatgtgcatgtgtattttacagggtggaggatagtgaagacagattcaagcgataatacatcaggtttaaatcttctataaatgagattggattactgcagctgataaacatggaaatgagtaattaaaacatggtgtgtaagg

SEQ ID NO: 1434 - DNA, 443 bp, Homo sapiens
  misc_feature 322, 334, 343, 345: n = A,T,C or G
ctctttcagatcttcaagaatgtttaagcatacaaagaagccccgagaccacaagggtgagaactaccatcctccccgctctccggatgctcccacagcctgggctccccagtgcagagccagcaccaagcaggagatgcagtacagtgtgcccaggaccatggcagccatcacatatgccctccactggggaacaagaagtgcgttaggctgatgtactccactccacctccatacgtgtttgtgcagtgacaccagcctggagggccttctatcgccatctccctcctctgtaaatcctacccactctttgagtcttggncccaggggctgntgctctctntntctcaaatgatttctgtgttctcatttgtctctgccttctctgggaatctttggtgccacagggtaatctcctgtgtgtcactcctgacttcggaagc

SEQ ID NO: 1435 - DNA, 288 bp, Homo sapiens
ccgtgcttcccaccaagggctcttggatggaggtgtcaaggtgtgaagacacagcccacctagagaggagagactgctgacctgctaactgaaaatataagcaagccctgacatgccacaggccgtcggaagagacatttgcttttgagtacccagcctattctactctctgacttatgtagatgggacaaatggtgccctgggcacactcatctacacatcagcctgaattagctagtaaatcacaactgcagtagctaataacagccataaagccttttgaatgtt

SEQ ID NO: 1436 - DNA, 383 bp, Homo sapiens
ataacagcactatgggaaggaggaagaatttaatgaaagcttgtacctgctggctgaaactaagcagcctatttataaactgctctgaaatgccagggagcaggtaactcccaaatgaaaaagcaagcaggtctctcccaccatcagtgggatggctgagctgtctgtggtgcctttgcatcttgctgcttcgctgaccctgaaggtctgccccagcctcaggcgaccaagcctacagcgacctcaaggagcagctgcctcatcagtgcttgtaggaggctcaggatggagaggggtctgatgcccccattttgttcccttcttttgtcttcttttgacttccctagggaagggaaaatgtgctatgaagttaaaagaggaat

SEQ ID NO: 1437 - DNA, 251 bp, Homo sapiens
atagaaaagaagataaacactcaccgcagagagttggctccatgtggatctcaatggcttatggtgaatcacaattttttcatctgacttctgttctttgggctctgactcttcatcagaatcaatgtcaagggccttctccttgtagttttgatacaggacagcattttctgcaagaaaacaaggcctatgtgtcactaattgttctcaatcattatgttacttgttctaaataaacatcatatgtaccc

SEQ ID NO: 1438 - DNA, 220 bp, Homo sapiens
gtggcttgaaatttgaaacaccatatgaaggttggggagtctcagggacagcccagctggggatctgaagttgctggagaagattttgcctaggctggccagcaactggcagacaagagtcatcctttcacaatgctggagacagtagaccttcttcaggaccacaagcaagtcaccatctctgggtcacagcttcctcaattaaaaagttagaagatag

SEQ ID NO: 1439 - DNA, 229 bp, Homo sapiens
  misc_feature 12: n = A,T,C or G
gccctggcaacnactattgccttttctgcttctttgagtttgactatcatggatacttctacaaatattgattttcaagatcaggaaaaataccgggaccagaagacaaatttcagagccacctaaattgtggagtctaataaaagattcctttctcctaatgatgtgaccatccaaaggatacactctcagtgtaaacgtaaacccagaataaaattttatcatcacc

SEQ ID NO: 1440 - DNA, 309 bp, Homo sapiens
  misc_feature 255, 283: n = A,T,C or G
cagttttctgcacctgccttggtatttgacaactccagccaattttccacttgcttcctcaccaatgcttcttcagcttgaagactaacatctagaagagtcatgaagtctaaagtcaagaggagtcttatcttctagaaagtttttcaaacatcccaacctcaaaaagtttggctaaatggtgttcttctacagccccacacatgcaaacatctttattgcacttgtgtcattattttttcttcgtatatgtgnttttctataagtacatttatatgaaggnatattttgaaataaagacacttcctc

SEQ ID NO: 1441 - DNA, 756 bp, Homo sapiens
  misc_feature 1, 13, 19, 25, 59, 71, 83, 93, 96, 102, 110, 112, 126, 136,139, 150, 152, 156, 188, 197, 315, 442, 488, 529, 532, 565,578, 599, 600, 616, 658, 678, 685, 695, 736: n = A,T,C or G
ntcaacaaacttnaacttnccgggnttgaaaggacaaaacttttttcggggctttttcngtggggggaaancaaacgggtttnaaataaactnttnatatanaccccccncncctttgggaaatcngggccatttnacnaaaaaatgaantnggcncccaagggttttccgggcccgtttggggtggnaaaaggctnttccggttttgactgggggcacaaacaaaaacaaatccggcttgctcttaatgcccgcccgtggtttccggcttgtcaagcgcaaagggggccccccggtttcttttttgtcaaaganccgaccttgtcccggtgcccttgaaatgaaacttgcaaggacgaagcaagcgccgggctatcgtgggcttggccacgacagggccgttcctttgcgcaacttgtgctcgacgtttgccacttgaaancgggaaagggactggcttgctattggggcgaaatgcccggggcaangatctcctgtcatctcacctttgctcctggccgagaaaagnatncatcatggcttgatgccaatggcggcggggtgnataccctttgatnccggttaccttggccattcanncacccaaccgaaacanttgcattcgaaccgaacacgtacctcggaatgaaacccggcnttgtccaattcaagaagatnctggacnaaaaacaatnaagggcttcgcgcccacccccaacttgttcgccaaggcttnaaaggggcgcattgccccca

SEQ ID NO: 1442 - DNA, 599 bp, Homo sapiens
  misc_feature 421, 460, 466, 501, 548, 551, 565, 579: n = A,T,C or G
ccctgtgtgactcatggaaaacagggagtgacgggtcaagcagagaggaatgtgaacttagtgggtaatgccataaacctttggccaggacataagcagtagaagcagcctgcatgtgtcatccatgagaaggccccgctgtgactgcagaggcaggaaaccaggtgtcagtggagacaaaggagtcctcggcgcgtgaaatgggacttggagcagggcccgacgggaggggacagaggatggctgccagccagacagtcctaactcggggaattcagtgaccacagcatccccgggtgacacggctgtgaggccttcagagcatcaccattcagtcacccctttttacactggggaaactgaggctcaaggaagtaaagcagaaatgcctttagcctgggcaagaagggacctgtcctanccctgcattttgggagcagtgcttcttcaactacctaangcaaangacccatttgggtttcaacctcttatcttgttcanactgataggttaataagaaacaataaaaatgatttgccgggcaaggnggntcacacctgtaatnccaccttttggagntgacccggcagataacctga

SEQ ID NO: 1443 - DNA, 512 bp, Homo sapiens
  misc_feature 44, 46, 51, 52, 54, 55, 57, 63, 67, 74, 88, 93, 418: n = A,T,C or G
caagaacttgagacggggatcttccttttgtacccggccccatngnttaanncnngnattccnaccnttttggnagtccgaggcgggncgggntcacgaaggccaggagttcaagaccagcctggcctatatggttgatccttctagtctcgtggcagaactttgtagacaccaagcgagaggggcagcgtgttctggacctcattcctcacacagggctcacctccggatgagtcagaggccttagccggtggcccagccccgggaatgccaccccggttctgtaccctgcccaggccagctgacagggtgtattggggcacacacctgcagcatccagggcactccaaggagagggacgtacttttgaggagaagtctaaaagtctaagtccaccacctgaacttggtgggggaanggcttctataccaagagggctccccgcctgttcttaaaagccatttaagcagaatgacgtggctcttcaataaagtaaaaatgggtcatgctgg

SEQ ID NO: 1444 - DNA, 223 bp, Homo sapiens
gattgctccctttgggagacaccagccaccattccatgagggcactcttggagaggttcaaatggaaagaatctgaggtttccactaaaagccaatactatcttgccagccatgtgagtgagtcaccttgcaaatggatcctccagcccatcaggtctacaaataactgaagcctcaagctgacaacctgactgtaatctcataaagtcataattgaccaact

SEQ ID NO: 1445 - DNA, 618 bp, Homo sapiens
  misc_feature 561, 587: n = A,T,C or G
gctggagtgcagtggcaggaacacggcagcctcgatctcctgggttcaatcctcccacctccgcctcccaagtagctggaactacagattttaacaatcagactcaggtcaacagtggttgagataatggcccataattggctccagaatgcaaacgtggcatttctccaggattccattagctcagaatgacaaggtgactccctgcccccacctccctcacaagatggctccccggggcttcctctgagctctgtccctgtcctgcacctccctgtggggacggctgagctgctggtcctattggagcagcatgaacaccttgctgggtgttcatgagggagaaaagctcatgaaggaatgaatcagagttggatgctatgcatataaatatttaggcctgtaagggcttctctttggtgatctgattccaccacataccaggtacctcagcataattcaaacattcctgcaggaaagggtcataatctctgctctattaaagtccaatttatcctttaaatgaaatctactcacagtcctgcagatgaagactacttnctgccgatgaccacagcggctaagangctgaggcaggagaccgcttgacccagaagg

SEQ ID NO: 1446 - DNA, 459 bp, Homo sapiens
  misc_feature 367, 398, 400, 413, 418, 421: n = A,T,C or G
agtggggctccgtttggctgcctgtttactaaacgtttcagaagccggaagaaaatacattgttgagaacatagcaaaagcagctcttcttgacaaaaatggaaagaaacatcctcaagtttcagtgctcaatatattttccgatcaagactacaagagatcagtcattacaatagcaacttctgttgataagttggtggacaagcgcaaccaagcctaaaggcaagtgctgttgcgaggtcgacatccaggaaccagaggagggcagagcaatccacagaatggatctggggtgactcatggaggaaaaccaacacacagtaccatttaattctttttaaaaagatggaaaattataccatacccngaattactaaattcttaaaagagggggtttntngcattccatttgnaaaanaangtttccccatgttcttttaaaaattcattttaaaccac

SEQ ID NO: 1447 - DNA, 403 bp, Homo sapiens
  misc_feature 309, 337: n = A,T,C or G
gccttcagactcagattggaaactacagcaatggccctctgtctctcaggcctttgaaccacaccactggttttcctgggtctccagcttgtagatgactaatcatgagacttcacagcctccataatcggaatgaaaacaatggctagtcctggattggtcatctttaactttgatgagatgctgaaaatgaaagccaggactgagggaagattgaaggagtctgaacctctgacaacatggagtaccataccaaccctggactatctacctccagacttttacatgagtaagaaacacctagtttgntcaaaacagtattaatttggatctttgntacttgcagttaaacctaatcctgaaatacctgcattctcttgaagtaaattgctttcaaaaacct

SEQ ID NO: 1448 - DNA, 635 bp, Homo sapiens
  misc_feature 2, 6, 7, 25, 47, 50, 53, 55, 56, 58, 60, 63, 67, 69, 80,86, 505, 620: n = A,T,C or G
tnccannctgaggcccaattctgtnggaattgcttttttaaaaaaanttntangnntnanttngaantntgcctgtccanatttgngggccagagatttagaccctcatcctcaaggccttattcctcacaaaagccatatgtaaaactggctgctccacaagggctgggatcctgtgtgtctcattccccactgtgtcatcaagtgcccagcacaaaacagagctcagcaaatgcttgtcgaataaatgaatgaaaacgtgctcagcacagggaggtaaaggcaccaggaccccatggagagagagtacatgctgagttggctacatctgtgccaaactgtgaaagatgacaatggagatatttctctctacagtttctgaagatggacccagcccaacacttctttccatgcctggctgtttttaactgcaggcacagcactagctggtttgtctcaaagattatgggtcaaaagagaactgagagacaggcaagtatccccncggctggacatactttacttgccggcaatacatagtgctcttcttgcctgacaattcgaacaagcagcttgactctgtatttgaggccccactcccttttggctaactagaccanactaatttactcatt

SEQ ID NO: 1449 - DNA, 81 bp, Homo sapiens
  misc_feature 46, 53, 55: n = A,T,C or G
actgaggttgtgcaggaacccccagacacccgccccgggcatgctncacacangnggcgtgccccctgcacaaaaaaagaa

SEQ ID NO: 1450 - DNA, 616 bp, Homo sapiens
  misc_feature 67, 330, 333, 381, 428, 496, 519, 537, 590: n = A,T,C or G
gttttgaatggtgctgtttggtcacaacatccacttgctttgaggtattgttggccttgctctgctnacattctgagagatctgcactccaggcaccttctgtggacatcaagctcacgttttaccgtcgccactgaatttggccaccctcccccctctactgtgcttctgcgctacaactgtcccctcgtttattcaaacatggagttttctttcctatttatttttgtttgctggcatttttagagatgagactgcagaagaactttcttactatgccattttaaacacagctatctcatgatttttgtaaaatccagatataattgntgnctttttttattcttgcgtaaagtgtgaaatcttgcataccttcatggnattttgtaatcagccccacctatttcatcttcatcttctgctgcttnctcccacaacttttgtttggctacaagatgatatcataccaaatcctcagtggcaaaatgtgtttctnctgaattcataacataaaaaaanccattaaaaggggggtangcatacctgataactattactggaataaaaacccggactcacgccttagaaanaaaaaaggttatcaaagggcaacaaa

SEQ ID NO: 1451 - DNA, 617 bp, Homo sapiens
  misc_feature 36, 43, 52, 358, 379, 381, 407, 416, 425, 445, 453, 463,465, 472, 475, 491, 496, 507, 518, 520, 522, 527, 534, 546,562, 591, 599, 603, 604: n = A,T,C or G
tgctgctggagctgattcccttcccctcctcatctnccacctnctttcagtntcacatacacacacagatgctgccacagacacacgcgagcgcaaatatttacacactgccacaccgaagaaatccatgcacgttttcctgcaaacgcgcgcgcgcacacgtacttcggcgggcgcccacgtcctctgtctcaccaacagacacagacatttacacttctaggccaggaaagcgctaaccagggccctgtgactctacgcaggttccagaacacgccttctacatttgttactgaaccgatcagcgaacacagacaaacgtgccaacacttaaagtctactggctggacttcatctncatggcaacaaagcatggaangnaaagagttgatttcagaaggaactgngaagaagcncaacaatgngcccagtgataatgagtagnacctatgngggactcttnancttaaangantggcacgaaagattanctttnttattgctctngacaaaaaaantngnttttnttttggngggaatttgggnatcttcttgggacttntttttttccgatggcttcaaatcctggtngacccttnttgnngcatggctcaatt

SEQ ID NO: 1452 - DNA, 203 bp, Homo sapiens
ttttcagattcttccagcaatgtactacaaatttctggggaaaaggaaccatgtgcccctgccaagatgcccagtgcagtaccagcaagatggccaacgcctagagctcccttgttgatctgaaacctccccttttccttacttctccctctgttcagaatgtgtagacttctctaagctttgttaaacctgtttacaacttc

SEQ ID NO: 1453 - DNA, 445 bp, Homo sapiens
gtgttggaaggatgtcagatgagagctgggatggggagaggaagtaaggaggaaagataagcagctcccttccattctgacctgctgtggcaagaatcccgggactagcaagaccaacaggatgcagctggcttcactgaacataatttgctattagcatcttcaggaacacacactgctggataaattcccttccaggagaggccacaactgaccactacatggaagagacagctgcttcttcactagccaatgaggcatccccacccaagtgtgaccaaatgcctctgaggctcagcccctcactccagaatgcccccaggtacctgaggatgctccagatttgggggctgcaccgtctgtggtttctctacattaaacagtatttttgtggagtcaggggtgagggagtatgggttacttttaaatataggtttgccaactc

SEQ ID NO: 1454 - DNA, 460 bp, Homo sapiens
gggcctgagaatgtcactggccagaagaagttgagtccctagtgtgttgacccaccagtgctctcactgaccaactaagtgactgggtacaaattaaagaggagaatttgaatgtctggctgtctgggaaataaaaggtcagagagttgattagcaccatcaagccccaatacccagaatcatggagagaaacagtggctcggacctctaagcggcacctccaatgactttcctgcaccttgggggattccctcgccccattttttatcccattgccccttctgtgccagtctcttcctctgcgaggaagtggtttgagaaccctaaaaacgaatccaaggaatcctttttgtttggggcagttttctgcaggcaacatctgtgtgcatcttagttgtcacaggtctggtcaaatgtagagatgaataaattttaaaaataaacaactacaaaaatacac

SEQ ID NO: 1455 - DNA, 261 bp, Homo sapiens
gccctgccaccatgccatgaggaaatggaaagaccacgtggagtggtcacatataaatgttccagccaccagcctcagcagaggtcccagcccacagtcagcaacaactccagacacgtgagtggcagcaagatgatgccagccgcagttaccatctgattacaacttcataagaaaccctgagcaagggctgcccagctgagttcaagcaacgccccagacctgtgggtgatgataataaaattattgttgttttgagtc

SEQ ID NO: 1456 - DNA, 591 bp, Homo sapiens
  misc_feature 540, 551, 556, 560: n = A,T,C or G
gaaaagacagaagctgattgaggtcccagcttggtaacagtttgaagagttgcaggactggctggatgagtactggctgcagcaaatcaggctgccaggattctttatggctgtttctgcttccactacagctgagtcagaaaggtcgctgccccgtggtggcactagacgcagtggacctggcaagcaaatgtttccgctattagctctcagcaacagagactcatttatggtcaccttggaaatctgggcttatcgatctacagcccaagtctgctgagaagctggagcttactaaaggggaaacctgagagctgttcaagccccaaatattttccacttctgcgtcacctctgctgtctgttagcagagtggaggagaaaatacacagcacaaacaacgtgaaaaaatagttactctattcattaaaagctgtaacttccagattggacttgagaagcattaaagcaacagaggaccctcatctactatctgtattcaagcatgctcatgaaaaacacgctgctcaactggacttanaaggaacccgngcatnacangcatttcttgacagaatctcgtgggcctggt

SEQ ID NO: 1457 - DNA, 475 bp, Homo sapiens
  misc_feature 24, 52, 193, 204, 222, 224, 228, 263, 272, 283, 290, 314,338, 364, 406, 416, 437, 447: n = A,T,C or G
gctccttgtttaagccaaaactgntaaagaggaatcaggctcagagaagctnaagaagccggcctgagtcccagctagcaaacagcaaagccatgatttggacagaagcctgtgtgactccaaaacccacgctcttttcactgtgatgcacggctaatactgagctgagtgatgggaagggagctctctttgngggattttcangataccttcaaagatcangntggntctgtttgcagacccaactttgcaaaggacaagcntgtgtcttnactcacactanctcggcncaggttctgagcccttttgcaatnggaagttatttaacctgatcacancaaaatgaaagattatttgaaaaccngggatgtgaaattcttggaacccaaagaaaattatcccatgnttctccaagnacctttgccaccccttgtggncctgctaggncacatggaccccaaacctttccagaaga

SEQ ID NO: 1458 - DNA, 145 bp, Homo sapiens
  misc_feature 97, 112, 131: n = A,T,C or G
gtgctggtcaccttacccaacctgcggcctctacacagagaggccttgggggagaggaaaagcttctccagtgattgatgtcagcagctcacccganagccaagaacatcanaggtgggatgatgatgctngtggctatgagaca

SEQ ID NO: 1459 - DNA, 434 bp, Homo sapiens
cagaattgggacatattccacttggggctaggagccaactcctttccctgctgctactgctcactccctctgtctcatcgaggagaatgctccacccaggagcacagaatgaaaggcacagagtatagtttccagaatccccgcatttcagtgttcccaaagggctgaattcttgtcaatagaatgtaagtggaaatgggctatgtcactttcctgctgaagaggttaaaaagaaggtgaactctcttcatctgcagttcataagatagaaggatcccgggtccctgaatgacctcatggaaggccatctaacaggaacacccacattggactgtgatatgggcaagaaataaactttaattgcattgggtcagtgagaagttttatctgttacggcagttacttctactttaataaatacaatgcattatctt

SEQ ID NO: 1460 - DNA, 493 bp, Homo sapiens
  misc_feature 29, 34, 41, 45, 48, 427, 460, 472: n = A,T,C or G
tctggggagctcctgcattaagtgagganctgangaaacangcantancaaccagaagacaggaggcacaagaagttagcaaagaaagccacctacttcttccgccttaatttctctaagcacttatcaagcagaagaatcacagaagaatacaataaatggtctagaaactgcagtgatgatttactaaaggaagagcgtggttccccgagcaatggccccatcctcgagcccgaagacccactgccctaaatgaggacagacatttgtttttgcactcaaaaaagttgccttgtggctcgccatgccccctaatcttgcccccaaataaactcgagaccttagcgggcacgcactcaagtggctgaacatggagaccagcagaacagtgccggcggaatgacatggccgagaaagagagaaagangagggacattttggaccccaagggaaatttggnccggggtgggtngaaaaaaaatttggcccttga

SEQ ID NO: 1461 - DNA, 404 bp, Homo sapiens
  misc_feature 335, 364: n = A,T,C or G
aggcccaggagaaaatatgaacaaaaattggtgaaggccatcaccagacctagcagttgcatcctgttcagcaccacagacagctccctcgcaaatgccatcctttcaaaaggtaccatacagaagacagctactgagattctgcagattttctaaaagtgacatttctattacacatttcttcttttcagcactgtcatatgtaatggtatgcattattgcgttgtgtacattttgtgatacatcatcaatctgctacactaccccattaatccattcattcaataaaatacattgttatgtgccagatactcttagacaagtcacttaccccnttagcttcatttccttacccaaaacttgnggatcattatacatggttgataactaaggaaaggattttg

SEQ ID NO: 1462 - DNA, 583 bp, Homo sapiens
  misc_feature 20, 35, 38, 44, 55, 68, 93, 103, 291, 319, 325, 328, 376,378, 388, 423, 450, 464, 469, 490, 496, 532, 548, 554, 564: n = A,T,C or G
gatctccaccatctgggggnacacggggaactggnacnttgggnggggcctcaanaactccttcaacnaaccctttccactggcccgaacttnttgtgcattnccacaagcttggcgacggggtggatgccttgcctttggatgggaagaatccttgcaagtcaagactacattccttggcaccaaggtggccaaagcccgtaccgaacttggcttggaagcttaccttgggcaccaagaaagaaatggacctttcttcttattgaacaatttcttcaaacttgggccaangggttcactttcaaacttttcttaaaancttggnttnccaagcccacaccaagtcaagggggaagtcttccttggtattggaaangnacttggggtnggttttgcttggaaaccgggcttggaaattggaangggcccggggaaaccgccacccccacnttacccaaccggtnggggnggaaaattggggcattttacnaaccgnaaacaaagtcccccttggcattggaaattccccttnttttttggggggaaanaaagtnccccggaacnttgggcaagaaaccggaac

SEQ ID NO: 1463 - DNA, 339 bp, Homo sapiens
agaaaagtcagcaaaaactgcacattatacagggcgacaggcatggcagcagtttctggtgcacatgttgcctgtctcccggtgacagaagataacagaggactaagagcgcacatatacctcaagagccctaaggctgccacaggagggtaaacaactccacccagcactgctccaggccggcacaaccatcaacttttcatgagcgggcccactggctgctgtctggaatgaagaatcctatgttgctttccagcctcacatttcccctttgtgtactacaaaataggagctgtttcattagaaacataaaacaatgaggaagaagctgttattgac

SEQ ID NO: 1464 - DNA, 662 bp, Homo sapiens
  misc_feature 1, 8, 9, 15, 26, 28, 36, 50, 63, 73, 97, 375, 390, 393, 414,426, 436, 446, 473, 477, 500, 521, 531, 542, 550, 555, 556,566, 571, 575, 584, 592, 594, 607, 608, 624, 637: n = A,T,C or G
ngggaaanntacccnggctttatttnanaaattgancggggcgggccttnccaacttacgaanatgcttcaanggagggagccaaggaaagtggctnttgcttggggggcgccccacaacccttgctcccccgatgtccacccgtggatccacatcccgccagccgaagacctcccgtgccttggaccattgtcgtcttgggtcccttgttcaaacacccttctttatggaaacaccttgcttgccttggggctttcataagccatttccgccctacttcccgtggaaaagttctaaggggacaaggggaaagaaatggggtttgggcggaaacgttggaacccggggggccccaaaggcccttaattgcccttnccacccggcccaaangtnggcccttggaaacatttcttnggggcccccttngaattttttngggggcattncttttcattggaaacaattttcttggntttnatttcaatcaatttcccaaaatnggtttgggttcggttcccaanggcccccaanccggaatttgnaattaaanggganngggcctttcnttttntaangggcccaanggaaagcntntttggcccccggnnggaaccttgttttttncccaccgtaaccnttttattttttttccatttttcctt

SEQ ID NO: 1465 - DNA, 459 bp, Homo sapiens
  misc_feature 25, 37, 40, 402, 435: n = A,T,C or G
ataaaggaatactagacatcaaaangtttattacggnganggacatatagtcatccttccagtttaagatctaagagcaatactcaaacagaaatcaaataaatgtctatgacaattaaggcaaacatactcatttgtctacaagcaaagagcattttggaaagaacactcccttgttcaaattttggtgaactggttgtggagacaaaagtgactccatcttggatgctaatctgccatgttgacttctgattaaccccagtctggggaatgcctctaagatttctatttttatttatgtatactgtctgtaaaccctgttcttaggccaagacacccttgatgttatcaaatcctgcccttaggctatgacacacataacattctttcctttttctgganaggggggcttcaattggccttatacattccttntaaagcacatataccctttctctg

SEQ ID NO: 1466 - DNA, 476 bp, Homo sapiens
  misc_feature 368, 398, 411, 423, 426, 458: n = A,T,C or G
gctataaggatgtgtttactgcagagacaaacagtaagaaagtatacaaaattaaagaaaaatgacagttatctttacctatcacttcaagttatttctgtcaagaggtaatgacagttactgaaaaaagaagttctggacctttttcatttgcaaacttatttttacaaatggcttcttttcacataaaggatttgtgatggtttaattttgtgtgtcaacctggctgggccatagtgcccagatattgagtatatcattgttctggaagtttctatgaaggtgatttttggatgaaattatttaaattggtggactttgagtaaagcagattatcctccatgatgtggacagacctcccccatcanttgaaggaccgggccaaaatgaaaactganccctttgaggaanaaattctccaancanatggcctttggtctgtttctctggagaactgngactaatacaggttcttc

SEQ ID NO: 1467 - DNA, 218 bp, Homo sapiens
  misc_feature 36, 47, 58, 66, 85, 101, 111, 136, 171, 175, 199: n = A,T,C or G
ggcctcttgggggaacttccctgcttttaagtccanaacctggagantgaccaagaancacctcanaaggccagccaccctcaanggagcaacccattggncccagacttntcgcacggatgccagaaaaactttnaattggaaggaaggcttgaaggtcaacaatggggnaaanaagttttttaaaaaaataaaaaanggggagcctaatattgtgg

SEQ ID NO: 1468 - DNA, 82 bp, Homo sapiens
cccgtgcatggtggcttgtgcctatggacccagctgctcaagaggctgaggtgggaggactgcttgagcccaagaagtccaa

SEQ ID NO: 1469 - DNA, 90 bp, Homo sapiens
  misc_feature 27, 29, 30, 37: n = A,T,C or G
cacttttgggagggccaaacaaagaangnnttggttngaccccaggagtttgaaaccagaactggacaacatagtaaacctcatccctac

SEQ ID NO: 1470 - DNA, 262 bp, Homo sapiens
ataataagatccttgaaagcaggcctgaaccaccattgtacaataaacatttcctgcatgaataaattaatgaaagaatgaataataaaacaagatctcttcccagagaaagtttaaagcctctgaagacagcagacatccatttgaataaccacataacaaagtgaatcatttatattgcaaaagacagagaaagcattatacttgagggcagaggagggagaaagcatattactcaaataaagatgtgatactgaattag

SEQ ID NO: 1471 - DNA, 265 bp, Homo sapiens
  misc_feature 2, 6, 10, 11, 16, 17, 27, 29, 32, 35, 38, 40, 50, 53: n = A,T,C or G
cngggnttgnnaaatnngcccgtgaancncanatnaancncggcccacanaancaatggtaggaagcataaccagagtgaatcgattccttgatcctgctctgccaaaaaattaaagaggagcactcctggggtttttaacccagataagacttcagccacagccgtatttcccatgttcctggatctcttgttctggctcttattctgcggataaaatgtggaatagagtaagcagtgcgagttctgccggttcatctggcttt

SEQ ID NO: 1472 - DNA, 268 bp, Homo sapiens
  misc_feature 35, 50: n = A,T,C or G
gacgtctggggagctcctgcattaagtcagaaccngaggaaggaaagctngaaaaaaaatcgtcaaatgttgcgggattcttgtaagcacagagaactatgaagacctgacaaggagggtatctttttctttcatgcttgtccaacaagagagcacattgttagtgtgcttgaattccaacaaaagaaggcatagaatgaatcttggttgttcccttttacttgctaaatatgtactgaatgaataaatggtgcattatacatctatt

SEQ ID NO: 1473 - DNA, 456 bp, Homo sapiens
  misc_feature 377, 400, 404, 437: n = A,T,C or G
cctgtctgggacctgcctgcagatttcagccacttctggatacacctgggacagggctgatacctccactgtcttacactgtgaagagcgggacaaaccgatgagtgacagactactgaatcaatccccttttaagctgcttaagttccagatttagttttaaagagaaaaaaaattgtcatctttttaaaaagactgcatcttctttctcctaatagctaatatttattgagcattcatgacacgtatacactattttaaactgccactgtgggttgatgtcactcccccattttataaacatggagactttggtaactttctaacagtacttggccagtcagccaggcctgtgctcttcagaggcgcaatggggnctttatactaccacctaaaggcnggtnggatgaccatccctataactttgtttttaattnaagacaaacatgtaattag

SEQ ID NO: 1474 - DNA, 170 bp, Homo sapiens
atctgccgcctcgaagagaaacattttcagaaccaaatacagaattgacaaagagaagacggccttggagatagagcccagctttttcattgcgcaggtggaaaactgaggccagatgccgtgggacagatgcagagaatgataaagtcaccaaatgacggtgattattg

SEQ ID NO: 1475 - DNA, 467 bp, Homo sapiens
  misc_feature 372, 379, 413, 414, 421, 427, 438, 446, 451: n = A,T,C or G
gtctttaacgttttcggggacctctggaaaacctacaggcgcggccctgggaagctctgggtccctaggaggggaggtgactccgcggcgtcccgggaatgatcctcgcggagctcgcgaggtactagcgccccccagcgtctggattgagaaacgcaccctgcgagggtggagaaccagcccagccccaaagtgaggtggcagaaaaacgaactcacggccaaaggactggctgaggttaaccagaattgtgtaaatgtgttttgtcttgctgggctgccccctctcctggtcctttggctagggagaacaggattttgtttgggatttttcttttgcttttttcgactgtgcctggtggcgttcgcgggnttgccanttttttaaggtccaaccctggcttgtttttgggnnaaaaacnaaaccnaaacccccaangaattggnctttngggtcatttccttggg

SEQ ID NO: 1476 - DNA, 440 bp, Homo sapiens
cgagctgaaatttaccataatccggctgatgtttagactgcacccatcgttttttccattcatctatgagtaaaggagaaaaaaagaacgtaaagacaaaatgcagctaatactgaccaagacttacaggaacggtaaagccctgtgatgaatgtcctgttttttcctcattcaaaagatagagaaacagaagctcagaatcttgcccaaaagcccagttgtaaatggattctcactctgttgcccaggctggagtgcagtggtccaatttcagctcactgcagcctcttcagcagaatcttgaccctctctgagattcagttttttcatctgtagaaatggggacctaaggtacagagtttcttctgggagaattaagtgaaactgcatgcaacaccatgttaggcacactagaagtgatcaataaatactacttgagt

SEQ ID NO: 1477 - DNA, 438 bp, Homo sapiens
  misc_feature 15: n = A,T,C or G
gcatccattcaccangcatcctcagcccctgctatggcctggctctctggggtcagctttgttccctgcctgccttctgctgaggaatcagggcagtggcgggggcggccccaccagcccgcagtcactggcccagacacagcgctggacacaacaccccccgcttcccacagctgctgattcccgaggactgccggacgcacagctccataacaagattttgggaaacaaagtcaagagtgagggtgtcattctgaaaggtgaacggtgctcacagaggaggagcctgtgtctggggtcgtgtgcatcctactctgctcacagtggaggcatctttggaagaagtgacttattttctggtacagagaccattccctcccccacaccctctcctaagactttgtattgaaacaaagtaaatcttacagaaattgcacc

SEQ ID NO: 1478 - DNA, 193 bp, Homo sapiens
ttataatcatcatgactgcaactcaaagtccttaccaagaccctctttgaatgagaaagctctgccatgccttccctgtcatcatccactcttgcagcacagctggccctctgtatctgcgggttccacaccgatggattcaactgaccgtggatcagaaatacccagaaaaaaaattatatctctactgaac

SEQ ID NO: 1479 - DNA, 345 bp, Homo sapiens
ggtcaagtttcaggtgaaatcactagacaagaaatatcattcagactgcctagggctgtgttctgaagctacagaggtaccttgatgtcaggaagaatagcaatggcagaaaatgtttcatcttgcatgccagcacagaccaatggcaatggatgtctgaatcactgggttaacaaggaaaagaatgctgtgcttaagtagcaatgtctgctctgagcatggcaggagaaattattggcacctctgtcagatatttgatatctatttcttaaatagaatacatacatattctaagaacaagaaaagcataaacaaattaataaattactttctgacttctaaacc

SEQ ID NO: 1480 - DNA, 240 bp, Homo sapiens
  misc_feature 31, 40, 48, 60, 69, 70, 78, 83, 90, 97, 102, 145, 208, 217: n = A,T,C or G
ctttgtgctgcatctggcctcctgctctgtnttactctgncgctactncacctgcatgtnacctactgnnggatccgnttganaacaccntaatttnagaanacagagttttgaacatcactgacctttaccatcggtataaccnactctttacctcccaaggctcgctcatttgtacttattttttctcattgtctctcaaatttanccaactggnatgaataaactggaagtaaacag

SEQ ID NO: 1481 - DNA, 504 bp, Homo sapiens
  misc_feature 11, 36, 54, 125, 131, 147, 173, 180, 274, 315, 322, 338,347, 351, 370, 376, 427, 438, 439, 456: n = A,T,C or G
aggaaaccagntcgacagagctgtgatttgccctgngatttgccctgggccttnccacaattctagaaacccatgacttgacatcattgcgcggccacctgactcccagctggcttcagcctctncgtttnatctccctctactctnactctgctgctaccaagtcagacttnttttcanaatgccctgtatcattttaatgactggagtgtgactttgttctcagcacaatgagtaacaaagccaaaacactggagaatacgtttacgtattnaagaaaacctcagacaaggaagaatgctttcataatacagnacattanaatcagacgaagcctngaagggcanaatnaccgatcctgaaaaatcanagtgtnctacagaagaagacgacagcgtttgagcacatttgttgaagcagcctcctntcccttatggnncgataatcccacaccgntttaccatgctctctggccttcccagaacatcaataaaaactgcatcc

SEQ ID NO: 1482 - DNA, 274 bp, Homo sapiens
taactggcagaacccacaccttcaaaacagagactttggctgcatctggcctcctgctctgtcttcctctcacctcctccacctccatgtcacctactgagggatcgcttgagaacaccagaatttcagaagacagagtttgaacatcactgacctttaccatcggtataaccaactctttacctcccaaggctcgctcatttgtacttattttttctcatgtctctcaaatttagccaactggtatgaataaactggaagtaaacagttctac

SEQ ID NO: 1483 - DNA, 299 bp, Homo sapiens
gtaatcttctcatctgtgaggatatggaaccccaacctcttcctggacacctgatgatctgcttgtgatgggctcagagtcttgaaacacagaactatgagctcatctcatatcccaatccagcagcatggaaacctcagactgtaaggcccaagactggcacttgttctctcccaactcttttctttctctctctcctttcttttatcccttaattccttcttgcttccttccaagatttatactattaccttttaggcaaaacatcctgaacatgtaaaataaactaattaaaatcg

SEQ ID NO: 1484 - DNA, 395 bp, Homo sapiens
gaggagtctgagaagacctaaaacagaagagaaaaaggcgaagaagatgcttaaatatatacattattcaagtaattaactgaagccttgagcgtacagatgatctccgaaaggacgccacagaggggagaaggctggacttgcagaacacattgctgttgaagaagtgacaggaagattcagagctcacaaagaagacaggtcagacgtggagaggcgagccagcagaacaccctcagaaatactgctctcctgttcggatggccagttttcatattttagaatatttttcaaaaagcacttcaatataatgaagttccctcagttataacaaggccatttttcatagctatttgtgtagatagtccaaaagtgtggtgtgttatcagaaaggg

SEQ ID NO: 1485 - DNA, 440 bp, Homo sapiens
gaagaaagcattgctctggaaagagggaagttcattcactcatccaagaagagcaaaggtagatgccctgcggctatggaggagggccgtccaagctcacagttcctagaagtttgtgtcaccatttcacatttagcaccagaatccagccttggcagattcagggaaggaagccaaggacacagctggtggtgaagacagaaactcctgtgtgacaactgccccctaggacacagtttagggtcaattaacatttcctgaacaacttgcaaatggaaagagccatccccaatgaagactgaaaaatgagaggctcaactcatctattatgacttgaacccaagtctatctgtgtttgcaaaggctgtgctgttgcacctagacctccacccagaaacatgttttggggctgacattttaatagaaacatagagaggaaa

SEQ ID NO: 1486 - DNA, 199 bp, Homo sapiens
  misc_feature 41, 185: n = A,T,C or G
tcccgtctgaactgttttgtcttggccctgtttccacccangaagccgcagatcctgactccttgtgtttgtttctctgcccagatgagaaacacccatcacctctgactttccaaggagcaaatcacgctccgtgccgggctcccccaacaacaccactccctcttcccttgcgatctccaggnctcctttgacactt

SEQ ID NO: 1487 - DNA, 426 bp, Homo sapiens
  misc_feature 4, 6, 21, 25, 26, 28, 37, 39, 45, 53, 54, 59, 60, 62, 65,66, 73, 76, 86, 96, 116, 359, 366, 368, 380, 382, 384, 401,405, 407, 411: n = A,T,C or G
ctcncngctttaaatcctagntggnngnacgggctgntnacctanaggctgtnntaggnncntcnnaaccacnccnagttgcttcnagcctccttngcgccagcacatatctgcanccttgggccaccgatcctaagccaaagcctccccaacctctgggctcagaagcaggtgtaatcccaactccagcagggaattccagaggtgaaggtcacgggagcatctttaatcttcggttcccagtagagaagatacccaaagagcagggagcaggagccagctccaggctatacatttgtttattcatcaatcattcatttatgcattaatcattcattccccccacccaaaaaaaaaanggccagngnggccaattcagntngnacttaaccaggctgaanttgntnaaangggggggacccccaa

SEQ ID NO: 1488 - DNA, 533 bp, Homo sapiens
  misc_feature 21, 30, 32, 33, 34, 35, 37, 38, 61, 79, 82, 86, 112, 121,134, 149, 173, 174, 180, 190, 245, 259, 264, 272, 275, 308,315, 320, 351, 362, 394, 483, 500: n = A,T,C or G
tttttttccccccccccccgnggggggggngnnnncnngggggccccccctcttttttggnggttcataaagggtgganacncccnttgggcgccctttttgggggggtttnaaaaaaganaaaatcctcttcntggggcccttaaaancccctccccttggaagataaggcnngggggnaacataacanggggccgggggccccccccactttatttgtccccaagccttaaaatttttttttnggtaattttttttnaaagnaaccaaanaanggggggggggttttccacccaatgggtttgggncccaaanaactngggggtccttttggaaacttcccctgggganccctcaagggngggaaccccaactttggcccttaaagcccttnccccaaaaaggtggcttggggggaattggcaagggtggttggaaagtcaacccacacccttggaccacaaggtactaaataattttggncctttaataaataagtnaaaaactgggatcatatgaaaatttaatataag

SEQ ID NO: 1489 - DNA, 473 bp, Homo sapiens
  misc_feature 16, 17, 23, 26, 49, 76, 79, 107, 128, 140, 190, 218, 337,432, 451, 452: n = A,T,C or G
agggaattacaatatnnctttcnggnaagtccgggccagagaaaagggnacattgcctgggcttgcctttggaaanganccagggcaggggaaaagcttcttggganggaaaacccttgccgtcaagnaaggcttggganggaaacttgaaagaaagcttgttgttctttccgaagaaagcttgaagctnaccgggggccaaagcttgccaagtaagnaatatccccttgggatccaggggggggaagggaaccacccatttgttcgggaggaaagaataaggggaaaccaagccttttaaacttggggattgaaaccaagaaaaaatccttgcccnaaaggggaagaagggaaagcttgaagcttggggaaccgccttgggaaccgaagaagttttgccattttaagttcccaagatttaccggggagggnccgggccgcccgggcttanncaagtgggacccccaccggtt

SEQ ID NO: 1490 - DNA, 512 bp, Homo sapiens
  misc_feature 15, 23, 36, 40, 43, 63, 65, 66, 73, 79, 88, 102, 106, 112,118, 177, 179, 185, 187, 197, 205, 208, 214, 220, 221, 238,252, 259, 278, 288: n = A,T,C or G
agcttacccttggcnttttaagnttcccctaacctntatnggnggaacccacctttattggantnnagtagantctccnttgttgttntttgaaaaccccanaaantttggnaaaacncttttttcttttttcctttggcttttaaactttttggcccccccgggggttttcccaananaacagngnggctttcaanccccgaanggnaatggnaatccnnaagtttccaacaccacnttgacttttcccangggaacntcaaaagcccaagaagaanggggcccaangggacccaagcttcgaggggacaccacaagcccagggggcttcttttccttccgaaaacccccaaggggacttgggactttgcaagggggcttggggacaagaaggttggggggttgggggggggaaaaagcaaattgcctttgtcaaacccacgttgggggggaagccccactcccatttcccaagggtgcattaaaagtttgaaggggaaacacctccttgc

SEQ ID NO: 1491 - DNA, 518 bp, Homo sapiens
  misc_feature 4, 14, 30, 42, 44, 46, 54, 64, 81, 85, 89, 95, 104, 105,107, 125, 128, 150, 154, 167, 171, 174, 183, 218, 220, 245: n = A,T,C or G
ttcntgaaattgangaaatgggccccttcngggccttcgctngnangggggttnttttcttgtntgctttccggggccctntggngggnggggtntttgccaanncntttttggaaaagggcccnaanccccaacccaagggggaacccnaaanacgtttttccagnggcnttnggaataaancttgaaagggaagttttgggaaaacacacttgggnanggaacaaagggcttcggggaaagcntcaatcagccccgcattcaaaacaagaagtggaaacttttcttgccaaagaatgccggggaagttgggtttttcaagaagacattttcaagaaaaagtggaaaggggaagaagactcaaaggatttgactcatgaagggaccttgaaagggggtgggacatcccaaggaaaaggggcctcttgaaaatttcccacaccccaagccgccttgttgcttgagggactccctccattgttgggccccagggtggccaccaaataaaaaaatcctac

SEQ ID NO: 1492 - DNA, 344 bp, Homo sapiens
acccatgcaggagacctctccaggtacacatatttcctgctactgaatggcttagactgggatttgcaaggaactacgaagtccaagacctttgcctttcttttagaagaaggcaccagctggttctccaatgttgaaggtcttctccagagatgaactctgaaagccacatgttgagatggccccattacaggatggagagcacctgaacccccaagttatggactagaagaagacagttgccctggaaaatcatctgacccacattggactttatgtgagggggaaataaacctttattatgttaagctacacaataataaataacaacaataattgtgttt

SEQ ID NO: 1493 - DNA, 381 bp, Homo sapiens
  misc_feature 16, 20, 22, 31, 33, 41, 46, 62, 66, 73, 76, 87, 94, 97, 115,124, 125, 140, 151, 164, 165, 167, 172, 177, 182, 197, 224: n = A,T,C or G
tctccctgtccttttnagtncnccaaaactngngggaaaanctttnaaaaatatttctcccngggnaaaatgnggnggaaaagtccntggcacntgnaatgggccccctttgtanggaaaaaannaaccccaggggttcntgggagttccncgaaccgtggggnncnttgangggcnccaangggaagaaaaaaccnccgtggaaacccttaattaaagttttnggggggtggaagaagaagaaaaataaaaaccttaaagtattgttaaagcttcttgtcatttcaaaggggtaaataccaagttgtgggaaagggcaagaaaaaaaatggacccactctccccttggatatccattaaaaaggatgtcccaaaatcctc

SEQ ID NO: 1494 - DNA, 639 bp, Homo sapiens
  misc_feature 32, 45, 52, 57, 62, 65, 74, 76, 80, 86, 97, 99, 128, 131,143, 144, 155, 160, 168, 174, 178, 182, 185, 191, 193, 197,222, 231, 241, 255, 282, 303, 320, 592, 606, 618: n = A,T,C or G
tctgggggagcctaccttgctttaacttcctnaacttaaaggtanaacaacnccctnttttnccntgaaaaacnanggcntttttngacattaaagncncttttaaggaggtatgcccaaaaaaaggnaancccaaccccttnngccaaaaaatnaaacntcaaaganggggcnggcnaaantcngggaancntttnccccaggggggaagaagaatgaacncttttttantggggctttncagaaaaaggtggnaaggtccacttggctttttggcttggnctttgggaatcaaaggaaccnagaaaaaggaaaattanttggatacccaatggggaagccttggaagaatgccattttggtttggggaagggtttttcttgtcttcaaacttgggtctcttgacaaagcctcttgacttggaatggtattcccgtggcttgggccacttatgccaagcaaggcatcattaaatttaagacggggacttggcttgcacctttccttgaagaaagccaagactttccacttggatgggaaagaagcttgaaaaaaccaccaaagcccagggaagtggcaagaaccacttggnccttaatttgcttncttgaagaattnccattattaataaaaagaaaa

SEQ ID NO: 1495 - DNA, 342 bp, Homo sapiens
  misc_feature 1, 94: n = A,T,C or G
ntagcctcaggatggaggtggctgccagaaagaccaagtaatgatcagaagcatggaactttcagacctattcctcccaacttctggagagggngagtgcctggagactgagttaataattgatcacgtctacatgatgaaacctctaagtgacaaggatcagagagcttccaagttggtgaatacatccatgtgcagggagggtggcctaccctaaccccatcggacaggagcacccatgttcaggaatcttctggacctcaccttatgtattaatctctctttatctggctgttcatctatattcttcatagtatcctttataataaacaagcaaatgtc

SEQ ID NO: 1496 - DNA, 613 bp, Homo sapiens
  misc_feature 1, 4, 24, 27, 29, 49, 50, 82, 90, 103, 123, 151, 189, 211,447, 558, 561, 567, 594, 600: n = A,T,C or G
ntcntgaaactggagttcggggtngtncnattaattggggaaatgggannggggaaaaataaaaatggaactgggaatgggngccgcttnctttttttaaagntttcaaaaaatgaccatttnccaaaaacaaagcccgggggccttggancccccgggccttggtttttaaaaaattttaacaaacancaagttccttgggggaaagggngggggaacccacccaacctttttctttgaaataaacttgggggaagaatgaaaaacaagggaaagcttcttattgaacaccactttggaatcggaaatattgaacaagaacacccggaaaaaatcaacgaacttcaagcccccttccaagccaccttcttgccttgtttgccccgcccgaatcacaagcccgggaatggcaagcttgaaaaagaattcccttgggggcccttgggntcccaaacccgcccacttgtgggactcttgaaggccctcttgcatttgtggggtggggtcttgccttgtggataatttttgggtcattggggcttgggtcttggtccgggnttncccatnttggtcttggcccaaggctctatggtnggcttnaaatccctttggc

SEQ ID NO: 1497 - DNA, 611 bp, Homo sapiens
  misc_feature 4, 5, 22, 27, 31, 35, 36, 51, 100, 105, 108, 113, 119, 121,131, 152, 164, 191, 217, 218, 239, 252, 272, 293, 361, 395,497, 541, 549, 565, 585, 596: n = A,T,C or G
tcannaaactggagggacgggncacgncaancganncccctgggggggctntttaaaaactttttcagggagcccttatgaaacaaaaccccggggttgngttanggntactngggctngngtcccacccnactgggttcttttttttcttnttggggccccanaaatggaagggggattgccccaccaangggaccccctttccaaccagaacccnngggacttattattaaaccctnttttttgcgcccnaccattgaatgggactttgnaacccgcaaaagcttgaaggnccattcggataccgccctaaccccttacccccggggaacaatctttcattgggaaaaacaagccgggntttttttccgactttttacaaagccttcccggtngggcttgggaaggccattcttaagcttggcaagaaaaacaagcaagggaaaggatgctttccgggggaagcccttgatgccttgaaaaatgaaaaaaattantcttaaaggctattcaaatatcaagccaagccatttttttccanggagaaanggaaaaaaggccgaanaaaaaaacaaattttccaanaatggggttgncttccttccaaccca

SEQ ID NO: 1498 - DNA, 436 bp, Homo sapiens
gaacccaaaagaatgcccagaatgccaagaacagtgaacagccatatgcaaacgggcaatactgatgttagctttaaaagtaaggagttcagagtgctctgtgctgaacatctttcggtgtaattaagccttcatattcctgaggaggagctactaagacaccctaccaagtcctgggctgtgcctggaggttagaaaacgaaccacatagtcctgtaatgacagaaaaaaattgaaaactgtattttaaaaatgatttctcaacaagaccagccggccactcaaccacttcagtacctcgtttctggatgaagaccctgagcaggggatttgcactagaaaccgccttgcagaagttgtcatcattgttgatgggcagcaggtctccgtgcacatctgcatagccaatagttacatcactgttggagatatggtg

SEQ ID NO: 1499 - DNA, 445 bp, Homo sapiens
  misc_feature 13, 16, 22, 31, 62, 70, 73, 76, 89, 92, 93, 110, 114, 123,127, 130, 135, 139, 142, 160, 166, 171, 195, 201, 237, 296,301: n = A,T,C or G
gttctgattgatnccnaggctnttgaagtanaccccaccatttaagccagagagggagattnaagtgganatngcngccacctattatnccnngatatatttggtatacnaacnaagaaactnaatnatnaattngacnatnaattttaagggaaaaggnaaaagnaaacnccagggggccgggtggcaatttgntttccnttcttagtcccttcaaaaaagtagaaaatagtgganatgaagcagggttgatatgaatttggcttgcttccccccccaatcttacctttgcttgnaggtnccataatccccacatgtggggggaggaagcctttaggaggtgatttaatcatggggtgggtacccgcatgctgtctcatgataatgagtgagttctccaagaattaacgcttttataggaacctttttccccttttacttggcc

SEQ ID NO: 1500 - DNA, 295 bp, Homo sapiens
  misc_feature 22, 33, 36, 37, 44, 55, 56, 58, 60, 63, 67, 70, 74, 78, 89,96, 213: n = A,T,C or G
gttcttcccattctggagtaanaggatgttgcnttnnaagggtngtgggaagggnncnanaancttnccnggantaanggcctaagggnggctttngaccaagggaccctccaagtcaaggttccttttacatcacatattgggacccccaacagctgggcttcttcaaggtgagacaagacctgtggtttgaatccaccatttaatggctgngtgatcatgtgcaacttactcaacctctcagagcctcaagtttcctcattaataaagtggagataataatagaacacacctt

SEQ ID NO: 1501 - DNA, 181 bp, Homo sapiens
  misc_feature 15, 57, 132, 134: n = A,T,C or G
ggtttcctggagttnggattttgctgactgcacactcacggtgctatccaacatgancatcttccctgcagtttctacaatttggcagttggatccacctgaatcctttggcaaggccaaacgtggtgtctnangaagaacacattgaagtctctgttttttaaatatcattatgaccttg

SEQ ID NO: 1502 - DNA, 469 bp, Homo sapiens
  misc_feature 48, 52, 59, 60, 61, 65, 68, 70, 86, 94, 97, 145, 148, 245,422: n = A,T,C or G
cagaaactgagatgaaagctggggttggagatggagtttgtcattttntgancttaaannnaccngcntnataacaaaagccagcncaccccanacnggagaatggaaagggaggaaaaatttgggtcccgtcttttacaagggntgntgagttacttcaccaatcctggaatgctgatcttttgggaacttgttaaacagtctttccaccccctttgttcgaagcttttggtgaagtgtttcanaaactgacgaaatgcaggatcgttttccttacacacacaaatgccatggcaacagcaacttcgtgacaacagcaaagaaagccagactgggaatttgccaacccagagtggtgaccatctgtgagggcccaaacccttcaaatgttgccccgttctaaagtgcttatcttaacccangcttttgtacatagcaaaagcgacatttaaagtgacataagaatggg

SEQ ID NO: 1503 - DNA, 400 bp, Homo sapiens
  misc_feature 33, 39, 53, 62, 100, 117, 124, 125, 127, 132, 135, 141, 169,218, 263, 267, 281, 285, 292, 311, 321, 326, 337, 341, 342,359, 380, 386: n = A,T,C or G
tttttttccaattggggggggaccaaattttgnggggtnaaattcccaaatangggtggccntttttttgccttgggaacgacccatttgggggggaaanttaaaaccccccccttntttggcnncnttgtntgnaaaagnaaattggccccccggggccctttttttncccctttgggccaaaggggaattttttaaaccctttaaaaaattgggtnttggccttgggggaacctttggcccaagaatgggccccaaaaagngggnacccccaataactnttanccccctntttggccttggttcaagcncccaaaaggnaaaanaagaccctggngtcnntttgggggaggtggggnggaaacccaaaatcccatttngggggnttttttttaaacct

SEQ ID NO: 1504 - DNA, 185 bp, Homo sapiens
  misc_feature 54, 55, 69, 131, 134: n = A,T,C or G
ttggggggggtttcccccaaacaaaaattttcccgccttttctttcagttggannggtggggagccccnaatggaacttaaaaatttcttgttggggggttggggaggaagaataaaaaatgccccctttnttnggggcccttggaccccttattttggccccttgcccattgcttgggcccttg

SEQ ID NO: 1505 - DNA, 184 bp, Homo sapiens
  misc_feature 20, 28, 33, 34, 39, 44, 58, 59: n = A,T,C or G
ataagcagataatgcctggncatgcaancttannaccgnactgntgtttgcaagctgnntaagtgagcaaatcttgggaagatttcaagcacaccaacatggcacatgtatacatatgtaacaaacctgcacattgtgcacatgtaccctaaaacttaaagtgtaacaataataaaattttttt

SEQ ID NO: 1506 - DNA, 309 bp, Homo sapiens
ggaagctttcacaccacattttgtttcctgacaagagaaggagaaatcgttggcctctgcgtgacatggagggtccccccacctgcaagcttttgtgtttgctggatcttggacagtaccctggcgaaaagcattcggcaagattatccggctagcacagccttcaaggaataaatatctaacaccttgttccctttgcggttcaaaagccactgtcactggggtacataggcagttttaaaaaaggctacaattcatatgcaaactagaggaggatttccatgatttcataataaaatgttgaaacgc

SEQ ID NO: 1507 - DNA, 143 bp, Homo sapiens
  misc_feature 43, 49, 61: n = A,T,C or G
gtggccatgtacttggcttaaagttaaggattctactactgtngaaganggagagaacggnttctagaggacaactggcagtctccttgtagctgagacttttttgtgtataaaaattaataaaattggtttattaatttgtt

SEQ ID NO: 1508 - DNA, 210 bp, Homo sapiens
atctatgcagattagctctctgcccttcctttaataactggactcttggagcatctgattgacagagatgggggtttcgccatgttgcccaggctggtctcaagctcctgaactcaagtgatcttcccacctaagcctcccaaagtgctgggattacaggcatgagccacgactcccagcctgaaatatagattttaatcttcagcttgc

SEQ ID NO: 1509 - DNA, 453 bp, Homo sapiens
  misc_feature 424, 434, 435: n = A,T,C or G
gtatacatccagatggccggaagcaactgaagatccacaaaagaagtgaaaatagccgtaactgatgacattccaccattgtgatttgtttctgccccaccgtaactgatcaatgtactttgtaatctcccccacccttaagaaggttctttgtaatctcccccacccttaagaatgttctttgtaattctccccacccttgagaatgtactttgtgagatctaccccctgcccacaaaacattggtcctgactccaccgcctatcccaaaacctataagaactaatgataatcccaccaccctttgctgactctcttttcggactcagcccgcctgcacccaggtgaaataaacagccttgttgctcacaaaaataaaaaaaaaggccagcgaggccaattcagcttggacttaaccaggctngaccttggtnnaaaaggggggctcccccc

SEQ ID NO: 1510 - DNA, 344 bp, Homo sapiens
tgcctccagaaagaacgcagccctactgacaccttggttttggcctggtgagaccaactttggacttttcacttccaaaactaatttcgctcttgttgcccaggctggagtgcaatgacgagatcttggctcactgcaacctccacctcccaggtttaagtgattctcctgcctcagcctcccaagtagctgggattacaggaagaaaaatggaactaaaaagggaaaacaatagcaacaaagatcaaaataaataacaaggaagcggagagaagaaagaacatggtgaagagagtgaaaagcattgtcatttggggtgaattgcagaaagaaataaattattg

SEQ ID NO: 1511 - DNA, 473 bp, Homo sapiens
  misc_feature 414, 428, 444, 455, 456: n = A,T,C or G
atgcttcctgggaagctcccaggagcccaacctaagaagaggggaaggcccagaggagccaggagcgagatctttgacactacctgcttccccacctgctgctgccttgtctgggctggagctgtgctaagagcagttctaggacagatgaggagacaactgttctgcccggggctaaggactgaaccctccaggtctacatttctctttgccatactgctctgggctctgggggttgacctgaatggaccacacagccatggtgtctcctgtcctccaccttcactggtgaagactgggagtgaggaagaagagtgagattgcaccctctctgcaggaccatgggcagaccctgccccttacctcttctcaggggtctctcttctctcctattaacttctttccatttccctnattaagccctttgntttggttttttggganattgccggccnncaccttttggaaaattg

SEQ ID NO: 1512 - DNA, 403 bp, Homo sapiens
gagtctactgacagaagccaaaggttgctgctagtttcagcttcctggtgttcctcattattttcaaaaatgtctgactgcatcttttggacattataaaaaccacagtaggaaaaaacgccagctatttcaatggaccaacaaagtgagactccaaagtgagccaagaagtcctcaaagcccttcctaaaggatggaggaacacatgaatatatacatcaaatcctccttccacagagactcactgaagggaatgaagaagggaaaagtcctcctaattattaagatgcgttccttgggactcggagaattaggaaggaaacccccaagtcttgaatacatttctctaaagaggccgaatacttaataatcaggggagattaaagcaaatgggagacccctt

SEQ ID NO: 1513 - DNA, 445 bp, Homo sapiens
  misc_feature 347, 350, 351, 358, 366, 405, 414, 417, 418, 419: n = A,T,C or G
agacgggggtctcactacgttgcccaggctgatcttgaactcctgcctcaaatgaccctcctgcctcagcctcccaaagtgctgcgattaaaggcacaagccactgtgcccaaccaaagggtcttgctctgtcgcccaggctagagtgcagtggcgcaatcttggctcatggcaacctccacctcccgggttcaagcgattctcctgccacagcctcccgagtagctgggattacaggtgcctaccaccaggcccagctaaatttttttgtatttttagtacagacggggtttcgccaccttggccaggctggtcttgaactcctgaccttgtgatctacccacctnagnntcccaangggctggnattacaggggggagagaccggacccagccaccttactgngtttctgantgnnntttcctttcctttccttttcccttaa

SEQ ID NO: 1514 - DNA, 486 bp, Homo sapiens
  misc_feature 416, 424, 462: n = A,T,C or G
agacgggggtctcactacgttgcccaggctgatcttgaactcctgcctcaaatgaccctcctgcctcagcctcccaaagtgctgcgattaaaggcacaagccactgtgcccaaccaaagggtcttgctctgtcgcccaggctagagtgcagtggcgcaatcttggctcatggcaacctccacctcccgggttcaagcgattctcctgccacagcctcccgagtagctgggattacaggtgcctaccaccaggcccagctaatttttttgtatttttagtacagacggggtttcgccaccttggccaggctggtcttgaactcctgaccttgtgatctacccacctcagtctcccaaagtgctgggattacaggtgtgagagaccgcacccaggcaccttactgaggttctgaatgntcttttcnttctttttcctttttcccttaaattggcccaaagtttnatccttggctttttttactggcta

SEQ ID NO: 1515 - DNA, 443 bp, Homo sapiens
  misc_feature 1, 3, 4, 11, 12, 16, 22, 23, 25, 30, 34, 36, 37, 41, 44,48, 51, 52, 59, 61, 62, 83, 106, 109, 113, 423: n = A,T,C or G
ngnngaggaanngtgnctgagnncntgctngaancnnatgntgngacnctnnctgtgtnanntgcggaacttagaaacagagnttcaccatgttggccaagatggnctngatntcctgacctcgtgatccgcccacctcagcctcccaaagtgctgggattacaggcacgaaccactgcgcccggcccaaaatgaaaggagccccaggcctctcaaaaagtatgaaagaactggaattcaccagatcatcacatccagacaatgagacaccaggcccctcattcatcatgatggcttctttacccctatggagttcctgttttcccttagatagttacatttcttccctgctatataaacccctaattttaagtcaatcccgaagacggatttgagcttcaagcttccatcttctttggctgnagaacctggttaaaggcctt

SEQ ID NO: 1516 - DNA, 360 bp, Homo sapiens
  misc_feature 343, 344: n = A,T,C or G
ggtttcgctctgttgcccaggctggagcgcagcggcatgatctcggctcactgcaacctccacctcccgtgttcaagtgattcttctgcctcagccaccaaggcgggcgtcccaaagtgctgggattacaggtgtgagccactgcacctggcttagaaatcttttcattctttcaacatgaatcctgctcttagaatcacagagtacaaagcttcctggtacaggtggggaaactgaggctccgagttgcctatctgattctgaggacacagcaccccccaccagcacacctggcacttgctttgtatattagtgtcattcggcacaagttagtggaaaatannagcataatatatagct

SEQ ID NO: 1517 - DNA, 212 bp, Homo sapiens
gaaccaagactccttggataagtggctgattccagaggtatagcagataaagtataaggtcttcagaatgagagaagatatgccaaagactttttatctatacctgttcctgttatgatgatgaaatcctggactactagactgaatctgataccaaaattggaagagtttttgggtatcttgggagaggacattttggttgtgcttgcatt

SEQ ID NO: 1518 - DNA, 456 bp, Homo sapiens
  misc_feature 21, 35, 68, 360, 368: n = A,T,C or G
cagaactcgagggacatgganagctcgatgccacnaccccactagagccagggtgataaatagagaanatggctagggtagagcacacaaggagagcaggttcagggagagatgaagatgagaccaaagcgggaagagtgaagggaaaattaacctccccttgctgagacgtgtgacactcaaggcccaaatcagaaaacttctgcttgaggaaacattactctttcctccatgactgctggtggtatccatctgtcagactccctgagccttgatgcccctcactccttctgctgtggagtaggaacgtgaaacacaaacagtcatccctccaattcctccaacccatgggggattggntccatganccctaacaaaataccaaatttcatggatgttcaagtcccttattgcaaatgggcatggtatttgcatataacccgatgcacatccccc

SEQ ID NO: 1519 - DNA, 350 bp, Homo sapiens
  misc_feature 186, 240, 243, 319, 322, 323, 326, 330, 331: n = A,T,C or G
ggaaattgaccattgcttccagacatgtgtgggagtccagaacatgccaccccaaaaggaggattgttgagctgaagacaattaagaagaaacagatgcaggaaagctctctgccctccatttgcttaaatgcaggacagagatttacaagataaaagacatcctgcccctgtcttttaccagggngaacaaaggttaaccactgaagacagttttagaccattatctgccaggagtagnagncagaggaatctacctgaacatgctttaccaactcgcttttatctgccggttacttgctttcccgcagagaagtccntcnnganaccnnaaagtcctttttcttttgt

SEQ ID NO: 1520 - DNA, 457 bp, Homo sapiens
  misc_feature 14, 25, 428: n = A,T,C or G
gcagtaaggctggngggcagggggnccacacctgtaatcccagcacttcgggaggcagaggcgggcggatcgcgtgaggtcaggagttcaagaccaacctgctcaacatggcgaaaccccgtctctactaagaatacaaaaattagccagaaagaaaaaattccgagtcctcaccttggcaagatggaggaaagaaaagcttttgagggggaatgagatgggacctgccagtgctttctctcagacagtgctgggagggctcttctgagatcccatctcccattctctagtcaagatcactggctcctgcctgggtcctggcactggctggatgaagtctcagaatttgctcctgcccccaggcagaggccctcatgcaaatttgagctgtttccagtgccttcagccagaagtccattttgcttggnggtggacccttcttttcttcttggatggc

SEQ ID NO: 1521 - DNA, 267 bp, Homo sapiens
  misc_feature 137, 187, 190, 191, 195, 202, 214, 217, 219, 225, 226, 229,233, 237, 239, 241, 246, 250, 251, 252, 254: n = A,T,C or G
atctatgcagattagctctctgcccttcctttaataactggactcttggagcatctgattgacagagatggggtttcgccatgttgcccaggctggtctcaagctcctgaactcaagtgatcttcccacctaagccncccaaagtgctgggattacaggcatgagccacgactcccagcctgaaatntannattntaatctntcagcttgtaantananaaaaanngtncggngagncnanttttngttnnntnttaatcccgcctt

SEQ ID NO: 1522 - DNA, 346 bp, Homo sapiens
  misc_feature 14, 31, 32, 148, 236, 244, 254, 256, 268, 285, 289, 290,302, 305, 306, 311, 324, 331: n = A,T,C or G
tctttttgctcctncattaagtccgaactgnnaatagggaaatttggatgcagagacacagagaaaatgccatgtgaagatggatcagagacagaagtgatgcggctgcaagccaaggaatgtgaagaatggccagccaccaccggangctaggggagacgccagcacagattctccctgagagtatccagaagaaaccaaccctccaacacctggatttcagacttctgaccttnagaagtgngagccaattnancatctgtagtgntttactcttcctacctnaaanntataaaaatatnttnntctcnccccacccttttntttcatnttcttttctttactc

SEQ ID NO: 1523 - DNA, 502 bp, Homo sapiens
  misc_feature 403, 418, 424, 431, 438, 439, 442, 445, 450, 451, 459, 462,467, 468, 469, 475, 476, 477, 489: n = A,T,C or G
taacatatttaagagatacggagcatcactagcagtactaaaaataaagttaaaagtcgttgacactaggccgggcgcggtggctcacgcctgtaatcctagcactttgggaggccgagatgggcggatcacttgaggtcaggagttcaaaaccagcctggccaacacggtgaaacccagtctctactaaaaatacaaaaacattagccggatgtggtggcaggcgcctgtaatcccagctacttgggaggctgaggcaggagaatcgcttaaaccttggaaggggggggttgcagcgagccgaggtcacaccattgcactccagtctgggtgacagagcaaaaccagtagcagaggaaagagggtgaaatgcagaaaatgactaatgcttttcatagtaagnccgctatccatttgntttttnaaacaanctatctnngcnttnaaagnntttttttnaantaaannnattttnnnagcctttccatnaaaaaaacagggc

SEQ ID NO: 1524 - DNA, 104 bp, Homo sapiens
  misc_feature 3, 20, 57, 59, 61, 74, 80, 81: n = A,T,C or G
tancatatttaagagatacngagcatcactagcagtactaaaaataaagataaaagncntngacactaggccgngcgcgnnatgaccttttgagcaagttcagc

SEQ ID NO: 1525 - DNA, 260 bp, Homo sapiens
gcactgaataaagaccattccttcaagcctacgtggaatcatgagccacacagagtagcatcgccagagggaacagaaagtcctcacttgataccggcagaaacaggaacagggttaggtagtctccggcaggctggtcagttttgatctttacaacttgggttgatgatcacctcagccctaccttcaaaagcgattcctgtccacaggggttggtaactgccttcccctttacacaaaaaacaagaaaaaaaatggtg

SEQ ID NO: 1526 - DNA, 425 bp, Homo sapiens
  misc_feature 118: n = A,T,C or G
ttcccaagaagcctccaggttgagctcctgacttgcggaccctgaggcagtgtggcagggtgagaggacacaggctctggagttcccgggacccaagcacagtggctgcaacttcctngcgttggctgtcaaaaaaggaaacttaagcagaaatgcccagctgtgatttctcttctccaacttcccgtgtttgacgtgaggtgtataggctggaaatgccagctccctggctgctgaaggagagactctgcagtctctcctttgtgattcttgcagctgctgaaagataccatgtcttcagtgccagaggatcaacaaagaaaaacaacttggcctcacatgataatgaccccaagtggttggtcaagaaaaagaagtggcaatgaatgaacagattatacatttctttgaagaatttgactgag

SEQ ID NO: 1527 - DNA, 533 bp, Homo sapiens
  misc_feature 53, 68, 71, 211, 329, 372, 409, 411, 443, 447, 461, 467,469, 476, 498, 500, 507, 516: n = A,T,C or G
cattaagtcagaatgagaccggcgctcagtgagtgcatgagtgagttagcggntgaccagcgactatncancatgaatgaatgacagactgaatgacatgaagcctggagtctcaaggccgagactgcaaaagaagagtccatcctcctatcccctctgctctgaactctcttcatgatcctgaaggtgctttggcacctggagactactngagccagccttgccggggttctaatctgaactcagatcacttcccagctgtgtaactttggacaagttcttaacctctctgtgcctctggtcccttctctgtaaaagtgtagtcatcnggcctggcgtggtgggctcacgcctgtaatcccagcactttgngaaggccaaaggcaaaaccaaatcacttgaggttcangnagtttttaaagaaccagtcctgccccaaccantggnttgaaaaacccttntttttntnactaaanaaacaccaaaaaaattaacccncnttgttangggggcaancccccctttataattcc

SEQ ID NO: 1528 - DNA, 337 bp, Homo sapiens
gatttaagaagcaaacagaaatagagccaaggatggagaaactgaggccacctgacttgccaagctgcgacttctaatcctcttggctaccccactggtctggttcaacctgagctcgcactgatttttttggatttgacgtcaaggcaaacatcattgcaaactcaattccagcatgccagctccagagcaccgtaacctttaaaaacttgggatttcgccgggcgcggtggctcacacttgtaatcccagcacttcgggaggccgaggcgggtggatcacctgaggtcaggaatttgagatcagcctgcacaacatggtgaaaccccgtctctac

SEQ ID NO: 1529 - DNA, 274 bp, Homo sapiens
gtggggtctttcaatataactgctgtcctcatgaaaagaagaaaacatcgtatgaagacagagatgcacagggagggcgctgtgtgaagatgatggcagaggttgcagagatgctcaaagagccaagaacatcaagggccgccggcaccaccagaagtcaggaaaaggcaaagagggttccactcagagtcttggagcatggcctcccgatgccttgatttcagacttctagcctgcaggatgataagacagtaaattcctgcagttttaagcc

SEQ ID NO: 1530 - DNA, 290 bp, Homo sapiens
acacagcatcatctctacccataaaagatggcattctgcaagactgagaagatgcccacctccattcccagagtccaggccttcattaactcacacgagaactacagaagcatcacccctagttctcctattagtcactcctcctcaactgcctctaatccatccatccatctatccggcatgggtcatgtaaagttacagctgagaaggtactccctctcttaaactcgtcggggctccatgtggcttcaagattgaaaataaaactactgcgtatggtatataaactt

SEQ ID NO: 1531 - DNA, 384 bp, Homo sapiens
gagaatgataaggggagagagtaagaaagcaatgagatacacatgtcttgactgcttctcttcatgctgaaatcctgggggaaagaagtgctaaatcagttgaggacatgggaacatttattctggaagaaatttgggtacagagacagacaagcaccaagagaagatgatgtgaagaagcacagcgagaacaccatgtgaaaatggaggactggaatgaagcatctacaagccaggaaatgtctgaggctaccagaagccaggagagaggcctggaacagatcctgcactagaaccttcaaagagagcatggtcctgctgacatgttgattttggacttctggcctccagagctgtgagaataaatttcagttgttttaagcc

SEQ ID NO: 1532 - DNA, 516 bp, Homo sapiens
  misc_feature 18, 40, 47, 53, 56, 62, 72, 79, 87, 105, 170, 312, 318, 351,361, 392, 394, 423, 444, 451, 475, 477, 489, 499: n = A,T,C or G
ctggggctcaaaaccgantcggctggcttttggcctaggnttaaaanggctanccntgatcntttaccaacntccctgntttccgcnttttttggggggaggacnaccgcttcctgaaccagttctgggtttccactttattcaaaaagggggaagttcaagccttttancaaatatccggctgggatcaatgatatttcattctggggtgccctctggaaaattacccccaaaaatgattttctatgacttaatcccgaacaatttggagggaaaacctggtgggaaaaagggtgatctcatagacaaagnttggtncattccaaagacgccccaagaaccagccactgnttcccgcatnacgttcccggcccattgggaacggacttttntncccaaaaaaaaggtcaaggccccattccnccaaggcctttgcaaggaagnttgcaantcccaactttttttgggtgttggnangggcaaggtttnttgatgtcancaccttttactttaagg

SEQ ID NO: 1533 - DNA, 481 bp, Homo sapiens
  misc_feature 155: n = A,T,C or G
ttatgatggatttattgggacataaccccattctaagttgaggagcatctgtacatgtataatggaattgcacaaagaagtgattgcagatggtggaagtcagatttctcaatgttgcagtggtaagttacaataggcaaaagggagggggctanaatgatctttagtgatgaattagaattggagacatcagtatgactcttatttagcttaatgtaggtacaaaaggtcacctattaaaatatttatgaatgtgactatatacatgggttaatatgtaaacatgttacttgctctgtcagctgaaacgacctaaaagtaatgactcttgtactcccagtagcaatgagcactctcagtgcccagatcttggcttttaatatgtttccccaataaaaggaaccagggttccttggaaaatggccaattctaaaattggggcaggaaatatgtatgatgagttggagtatattcttatgcc

SEQ ID NO: 1534 - DNA, 491 bp, Homo sapiens
  misc_feature 458: n = A,T,C or G
gacaaactttgcccaaggagaagctcaatggactgttgacctcttgtgaatggagatcatctcatctaatgtatttttctccacaaacagaagtaatttaaatgacatcttggcagagtagccaataatcaacaatggccacttcttccactcccaagttggctgaattgcaatgggacgatctcggcttaccacaacctccgcctcccgggttgaagcgattctcctgcctcagcctcccaagtagctgggattacaggcatgcaccaccacactccgctaattttgtatttttagtagagacggggtttctccatgttggtcaggttggtctcggacccccgacctccggtgatccgcccgcctcgacctcccatagggctgggtttacaggcgtgaggcactacgcccggccataatttttaaacatttttctgttggcacctgcccggaccatngattttaaatgatctacttacatgatggggaag

SEQ ID NO: 1535 - DNA, 323 bp, Homo sapiens
  misc_feature 284: n = A,T,C or G
gtctctccaattccctcagctatccggggttacataaatgaactcatcactagaggcctgcaccatcttcctgctgccctgcagcccacaggattaaacacaaccaaagtccctgcctggagaaagaggagctgaatcacacacctcaggatggagagggtcttcagagaaaggaaattctcattggggatgaaaatgttaaaagctagcccaaagcacactacgtacatgcaggagttgcctaaaagcacatatgattaaaaactccaaagaaaacgcaaacncttttggatttacgatactgtaagatagctcccacctct

SEQ ID NO: 1536 - DNA, 496 bp, Homo sapiens
  misc_feature 240, 452, 469: n = A,T,C or G
gtatattattaaaagcgatgattgtggaaatttctgtcttattactgaacacagaggaaaacaaaatcttcctgattgatgaaaaaccagtgttgtatttgggtaagctggtgacaatgactccaaagatcatccagaaccttcacaccaaggagggattggctaaccatggactgaaagaaggggacaactggatgaggagctggtaaagccagaaaatctcaggcgtgtgctcaccanggtgacagatgagaccttctgatgctctcttgcccgtgcacacttccattctctgagtcttttgggtcaagatctgagctttcagggagcacaccaatggcatgaacctctctgatgcctctgagcccagccttagcattctcttcttcatgagctactacctgtctacagcagccaacaactcttctgtcaaactcttgggtctatgccanggtaaaaaccataaagnactgcaggtggcttaaccctttgagga

SEQ ID NO: 1537 - DNA, 331 bp, Homo sapiens
aacctctgtccatgagcaatggatgacctcaggacaagaatgcaataacttggcctgatgttgtgaagtcacggtccatccagggatgggcaagaggatgaccagaaccatctcgagaggggctggaaagctgcctcacgtatgtggtcctgtgctgtgtctacatgttcctcactcgcctctacaacgctcatggcacgagggaggaaatggggtgcagaggctaaggaacgtgcccaaagccctacagctggtgtattagtaatctactgctgtgtaaccaattgccccaaaatttaaatgtgtaaaacaacaaagacgtctaactcat

SEQ ID NO: 1538 - DNA, 238 bp, Homo sapiens
ggagggagaagatcccatagcagctttgcagtcccttactgatttatgctctggaagataagacacgctttgcaagattcagctgacgcagacctgctgtgtcatattactttctttgtcttgctggaaagaagtgcaaaatacctaaggaaacctccttgtggcctccattaaccccagctagcacctaccaaatcagcaaaatccgaaatatgatttaaataaattatgcttaaag

SEQ ID NO: 1539 - DNA, 565 bp, Homo sapiens
  misc_feature 15, 32, 58, 76, 79, 83, 85, 119, 170, 205, 239, 273, 322,332, 381, 383, 424, 522, 529, 533: n = A,T,C or G
cctgctttaattcanaacttgaaggacatggncccgcggagggagaagattcattcgnccattgaccccgaggganggntttntnacttccgccgccctgggatgcggggcttcttttnttcttccaacacattcttggcttcattcatgggcccggaagaatcttggcnaatggcccaatgtcccccccagattcccccagaangggttcacccagaatccctaaaaccatgccgaanggaaagcttcccatcaaaaatttggtcaagggcnatatcatcaaagggaagtattgccacgaagaaccaatcgggggggaacnggcccgggangccccgggaagttttcccggggaagaaacgaagccaaaaaagccgccantncctgggggcctttgcttgggaagaaaccttttctaaaaaanggccaccctttgggccccttgccgccatcattgggacctttttttcaagcttttcccttccccaagggaatcaaagttttctttaccaccaaacttcnttgtgtnggcntttttggggaccaaaaatttaaaaagctttag

SEQ ID NO: 1540 - DNA, 684 bp, Homo sapiens
  misc_feature 36, 238, 260, 284, 307, 318, 348, 350, 450, 487, 571, 599,604, 609, 616, 629, 634, 641, 666: n = A,T,C or G
tgggggggagcttaccttggcattttaaagttcaanaacttggaggggtttggaggggtcccagtttaccttggcaaccattccaagttattttggaaaaaaaggaatggaattttttggcttttcattttggcaccttggccctttttggcttttctttcggtccaaaaaggaattttcccttaaaaggggaaaaaaatggggggccacccacccaagaaaattcccttggggaagnaaaatcctggcttcccaaaagnaaaccttggattaaccccaaaagnaaattttggggattcttggaagnaaggggtaagnaaaggggaaaatgggaaattccggtaaagntnggggaattgccttgccattttggtccttaccaattcttccccttttaagggaaccttccaaaaaaggaacctttttaaggttccttttccccaaggggtnggccccaagccttggaattttaaccccttccccaagnccttggttccaaaggggcccctttcccctttgggggaaaaaacctttggggggcctttccaaaggccttttgggaaaggaaggnaaaacccttgggggcctttttaattttnccccnaaggnaaattcnaaccaaccttttnccccnttttttnccctttgggggggggaaaaaggttncctttaaccaatttttcc

SEQ ID NO: 1541 - DNA, 259 bp, Homo sapiens
acatgggggtctcactgtgttgcccaggctggagtacagtggctattcacaggcacgatcattgggtacaatagcctggaactcctggactcaagtgatcctcttgcctcagctttcctagcagctaggactacaggcttgtgccactgcatccaacgtggacccccttttgtatgccacaatctatccagtgcctttcgctaagctttgcaatttccctcctatttgtaatattaatggtttatactttttgatttat

SEQ ID NO: 1542 - DNA, 346 bp, Homo sapiens
gacaaaaacaatgacagacttgtccgagctaccatcgaagtcttgggtctgcacgcaaaggatggaatcccccatctccattcccaaaagtttccctacgggagcctggtgttgtctcctccggaactgtcctcgcggctgcctgtttttccctagccatggttactgcctgcgggggattcagcctgtgaaggcagtcaaggcagttcaccactgtcatcaaacctacacccctgtgtgcatgcgcacacacacttgtaacccagtggcacaatgcaggaattagggaagcaaaggcaaatcgctgaatagctagggcacctgatccctgtaagggcccatcaag

SEQ ID NO: 1543 - DNA, 203 bp, Homo sapiens
atcaatgaaacaagaacaaagaggagaatcaggaagtcagcagtatgtctcctttattcccctatgctttagagtgagaagaaataccagaatctggaaccaggaagtgagtcctctagggatgaggaggtattcagctggatggctttttaaaacatttcctccagagtcttctgcctgattaaaaacagttttcgtcctag

SEQ ID NO: 1544 - DNA, 213 bp, Homo sapiens
  misc_feature 52: n = A,T,C or G
ctgagatcaatgaaacaacgaacaaacgaggagaatcacggaatgtcagcangtatgtctcctttattcccctatgctttagagtgagaagaaataccagaatctggaaccaggaagtgagtcctctagggatgaggaggtattcagctggatggctttttaaaacatttcctccagagtcttctgcctgattaaaaacagttttcgtcctag

SEQ ID NO: 1545 - DNA, 341 bp, Homo sapiens
  misc_feature 284, 295: n = A,T,C or G
gatcaaagccatcaagctacaaatgatcttacaaatggaacctcaaatgagctcagctcacggcttctaccgaggacccctggatcaacccgctggtccctcaattaccctagaaaattcccctctggaggacaccaaactgcagggccccttcttcacccctaaccagcaggaagtagccagaacgactgccacacggttcccaacagcagttggggtgtcctgtttagaggcaggactgagaggaggtgccagctgggcttcctgggtcaaggaagggggtnaaaaaagctgngaaactcactcatttcctgcatcaggacttacttcagtcctgtttt

SEQ ID NO: 1546 - DNA, 337 bp, Homo sapiens
  misc_feature 272, 278, 279, 283, 285, 302: n = A,T,C or G
acaaagaagtctctgcccagggtcgttgcttttaaagatattctgatgcaaaatgccagtactctgctcctccattctacagatcaacaaatctttctacagccaggtgcagggggctcttgcctgtaatcctagcactttgggaggccaaggcaggcagatcacttgaggtcaggagtttgagaccaacctggccaacatgatgaaaccccatctctactaaacatacaaaaacattagctaaacatggtgtcgcacgcctgtcgtcccancttctnnggangnttgaggcaggaaaatcncttgaacctgggaggtggaggctgcagtgagctcc

SEQ ID NO: 1547 - DNA, 308 bp, Homo sapiens
  misc_feature 286, 289, 292: n = A,T,C or G
gtttcagcagagcagctttaccatttgggctggtgaggcgagaattatcctgtgaaggttattctatagatctgcgatgcccgggcagtgatgtcatcatgattgagagcagctaactatggtcggacggatgacaagatttgtgatgctgacccatttcagatggagaatacagactgctacctccccgatgccttcaaaattatgactcaaagggacatctctgaaggtctctgccaactccagagctcccgccctgaggaatttgctgggcttttgttgcgantgnctngaagttcgccctttaa

SEQ ID NO: 1548 - DNA, 331 bp, Homo sapiens
  misc_feature 282, 284, 292: n = A,T,C or G
gctggagtgcaaaggcgcgatctcggctcactgcaacctccgcctcccaggttcaagcgattctcctgcctcagcctccagaatagctaggattacaggcgcatgccaccacgcccggctaatttttgtattttcagtagagaaggggtttagccatgttagttagccaggctgatctccaactccgacctcaagtgatccgcccgcctcggcctcccaaaatgctgggattacaggcatgagccaccgcgcccagccccaggcaacatattttcttaaggnancttttaanaaggccatgcatttccacatttccacacctttcattact

SEQ ID NO: 1549 - DNA, 322 bp, Homo sapiens
  misc_feature 283, 290: n = A,T,C or G
tttttagcctctgaattaagagttctgcataggtagccatggtgaagtctggaaacacgttctcagtgcctcaaccagcagctacaagtcagagtcaagcccattatgaccccttcttcctgcctgagctttggccccagatattctgagaggggttggatcctccagggcatcgacctcacagctctgtcttctgtcctgagctcttctcctggcatgtaaattcaggactcagataagccctgcccttcatagccaccttggatgctgcgtgactacctgngaatcanggaggactggaaaagacattagggagggtacc

SEQ ID NO: 1550 - DNA, 330 bp, Homo sapiens
  misc_feature 284, 288, 293, 297, 312: n = A,T,C or G
atttctggaaataaattccagaataagagttcatcctgccgatccagagccacagtttggagacgctgcattcctagattgaaggcctggctcctggtggacagccttctctctaaagctactctctccaggttctggcaactgcagccaaagggccaaagtgtatgactcaggagtgttacttgaattcctggaaccagctatgcctgaagtcaatccattccagttgcactttcttcattctaaatctccctgttctttcaaggatgcctgggttgcgaacngggnttccnggangggtaatgacaaagnggcttattccccataaat

SEQ ID NO: 1551 - DNA, 325 bp, Homo sapiens
  misc_feature 2: n = A,T,C or G
angcaaaacatcgcatctttccattttataggacaatgccaactcctgaagatcttgctctaagtggtcaaagggtgagcatactgcaggcaacaaaagatcgagcatactacaggcaaccaagggtcaagacaaatttacaggatccctccctaccgtggccactacccagcttcccagtagtgccttcctaatttgctgcccatggtaatggagacaaatacctgcagaagaacataatcaaaactcaaaggaaagtaaggaggagcaagtttttttaaaagggattccagttggcaatcctcttgttactaattcttgttga

SEQ ID NO: 1552 - DNA, 330 bp, Homo sapiens
  misc_feature 285: n = A,T,C or G
aatccccaaactcaatgaggacacgttttcctcccgagaacagcagaatggtaacaaagaacacatgaaaagaaaatgctttcaaggaccaaaggaattcatctacaaatatggaatttccagcatggaagtcagtgacaaagccctggcatacccccatcgcaggtgtcgtgagaacaccgtccagtgggacgaggccagccctgccctgagaagctgagattcccaccctacctggagggagctgagcaccctcacagcaactctgagcccctgacttcaaanggaaacttttttcctgtggtatcagacgtagagggcgggctcttt

SEQ ID NO: 1553 - DNA, 199 bp, Homo sapiens
gtggcatgatcatggcttatcgtagcctcaaccttctgaattcaagagacactcccaccttagcctccctgagtaactgggaccacaggcatgaaccaccatgcccagctacctttaaaaaaatagagagagagacagggtctcactatgttgttcaggctggtctctaataaattgttattaccaatgaaaaaaaaaa

SEQ ID NO: 1554 - DNA, 419 bp, Homo sapiens
  misc_feature 143, 156, 195, 218, 252, 271, 280, 296, 302, 305, 340, 348,351, 370, 376, 390, 400, 406: n = A,T,C or G
actgagttctttgccttggaacacgacgaggaccttctccttcctgagaggggacacgcctttcatcatcttctgctaagaggcgcccctccaccaccctgcatgagtaagacacagcctccctgcagcacagaggaggcttntgtgagtgcccanggcatcaccaaggtcagggagaacctcttgaggtaactngcatttgtgtcacgaagccgaanagggttgcaggggattgcgtgatccccatcctgntcatgggccaccaccccantccactcanaagataaggcctcctngatcanatncaatgactcattgcatgttatccccgcacttttanaagcttangtnggcccgattggctgaaccncattantttttaagaccatncctggccaanaatggnggaaccccatttt

SEQ ID NO: 1555 - DNA, 280 bp, Homo sapiens
  misc_feature 138, 235, 240, 245: n = A,T,C or G
ggtttcatcatgttgtccaggctggccttgaactcctgggctcaagcaatcagcccacctctgcctcccaaagcgttgagattacaagcgtgagccaccattcctggaccctcgtagtttttctggagcctcgtgatntgatatgatcttcctgccgctgattcctcacagtattggcttgccacacctccaggggcactgatcacattctacctggcattatttcatctgagtncctgncctancccttctgcccattagactgtaaccttgtttaggc

SEQ ID NO: 1556 - DNA, 359 bp, Homo sapiens
  misc_feature 109, 172, 184: n = A,T,C or G
aatggagctaccacatggtcaggaggaagagactcacaaagaaagatgaaggttgcagagaggtgctatggaaatagcacatgctaaaggagtcttctaagcagcccanaggcgatgacataccagtgccagcagaggaggagaaccacgcttcagtataacaaaaacttcnatgaatcatgcncaatgtggaaaagtcgaatagacatggctgaggataaaagaaaagaacgtacacataatctcactacccagagagaagcaatgttgacatatttctcttcctcaatgcatatttatatattgttgatatttttactgtctgtgcaattttgctttaattaaacatttagattatg

SEQ ID NO: 1557 - DNA, 70 bp, Homo sapiens
  misc_feature 1, 3, 12, 13, 15, 22, 43, 49: n = A,T,C or G
nantcattatgnntnctgtttncctggatggactccgactganagatanacgccattgacgcatactcgg

SEQ ID NO: 1558 - DNA, 178 bp, Homo sapiens
  misc_feature 16, 41, 47, 48, 51, 65, 85, 87, 125: n = A,T,C or G
cttgattacagcagcntgatgctttgcctggataaacaaangctctnngcnaggaagagactttnggaccagcaagagactagantngaaacagagtttaaacaagcatcataacccctgaagcnaattttatcatgatttcaatttgcatattaagaaactaagatttggaaaaaaa

SEQ ID NO: 1559 - DNA, 167 bp, Homo sapiens
gtgaagaatgaaggaacattccaggatcaagtttcctaaaatttggaaataaactgtggaaattctcctaagtttagggggagacagaaccacctagaatcactgacaccttgattcaacacaatccgcagaccgggtgattaaataaagcactttggttttttcat

SEQ ID NO: 1560 - DNA, 435 bp, Homo sapiens
  misc_feature 374, 375, 383, 385, 386, 387, 388, 391, 402, 407, 408, 409,410, 412, 414, 417: n = A,T,C or G
gggcattcaagataagccatcatatcccctgtggcctgcacgtacacatccagatggccggttcctgccttaactgatgacatttcaccacaaaagaagtgaaaatggcctgttcctgccttaactgatgacatggtcttgtgaaattccttctcctggctcatcctggctcaaaagctcccctactgagcaccctgtgacccccactctgcccgccagagaacaacccccctttgactgtaattttcctttacctacccgaatcctataaaacggccccacccctatctccctttgctgactctcttttcggactcagcccacctgcatccaggtgaaataaacagctttattgctcacacaaaaaaaaaggnngggggggncnnnnccnattttgggttnaaacnnnngnanttntttttaaaaggggggggg

SEQ ID NO: 1561 - DNA, 355 bp, Homo sapiens
agctggagcctcactttttcacccaggctgaagtgcagtggtgtgatctcggctcactgcaacctccgtctcccgagttcaagcgattctcctgcttcagcctcctgagcagctgggactacaggcatgcaccaccatgcccagcttatttttgtatttttagtagagatggggtttcaccatattggccaggctggtctcgaatcctgacctcgtgatccacctgcctcggcctcccaaaatgctgggatcacacgcgttagccaccgcacccagccttatttacctattaaagagcatattgattgcttccaagtcttaacaattatgaataaagctggtatggactttcaca

SEQ ID NO: 1562 - DNA, 340 bp, Homo sapiens
  misc_feature 146: n = A,T,C or G
gatgtggcagaagtgaccctatgtaactcagaaagacccaaccttaagagcttctgctttcctgcttggaacaccccctactgaaaaccagctgccaaacaaaagggccaccatgctgtgaggaaatccaagccagccagtgaagngaatagtcacatgaaggacgaccaaggcacagtcatatgagtgaagccttcttgaacattccagcctagctgtggatgaatgcagcaaagtgagtgatccagtcaacgccataagcaacagaagaacagcccagccaagccctgcctgaattcctgagccatgattcataagcaaattaaacagttattgtttc

SEQ ID NO: 1563 - DNA, 439 bp, Homo sapiens
  misc_feature 380, 388, 393, 394, 400, 406, 410, 411, 414, 415, 419, 421,425: n = A,T,C or G
gtatacgcccagatggcctgaagtaactgaagaatcacaaaagaagtgaatatgccctgccccaccttaactgatgacattccaccacaaaagaagtgtaaatggccagtccttgccttaactgatgacgttaccttgtgaaagtccttttcctggctcatcctggctcaaaaagcacccccactgagcaccttgtggcccctactcctacccgccagagaacaaaccccctttgactgtaattttcctttacctacccaaatcctataaaacggccccacccttatctcccttcgctgactctcttttcggactcagcccgcctgcacccaggtgaaataaacagcccttgttggttacacaaaaaaaaaagggccggnggggccanttaanntgggantaaacnaggnngannttgntnaaangggggggaccccca

SEQ ID NO: 1564 - DNA, 347 bp, Homo sapiens
  misc_feature 326: n = A,T,C or G
ggtctctgtcactgaagctggagtgcagcggcgcaatcacagctcactgcagcctcgacctcccaggttcaagagatcatcccacctcagcctccctagtagctggaactataggtgcacgccagtatgcctggctactttttgtttttatagagacacaatctcactatgttgcccaggctggtctcatattcctgggctcaagccatccacctgctttggcctcccagagtgctgggattacaggtgtgagccaccatgcccagcctcgaatttcctctacttggcctgaagcagaaagccacagacaacagagacctaagctnctaatgaataaagaacccccc

SEQ ID NO: 1565 - DNA, 328 bp, Homo sapiens
  misc_feature 263, 270, 272, 278, 281, 283, 286, 288, 290, 294, 297, 300,305, 309, 311, 315: n = A,T,C or G
gccctgcactcgatggatcagctggcaccacccagatcaataaactggctcatctggtcttgtggcctccatccaagtaccaactcagtgcaagaagacagcttcgaccccgtatgatttaatctccaacctgaccaatcagcactccctactccctggccccctacccaccaaataatcctcaaaaaaacccagtctccaaattttcaggaagactgatttgagtaataataaaactctggtctcccgttcaaaaaaaaaanggccagngnggccanttnanttngnanttanccnggntgaanttgntnaaangggggggcttacc

SEQ ID NO: 1566 - DNA, 386 bp, Homo sapiens
  misc_feature 363: n = A,T,C or G
gccaaacatgatgactcacacctgtaattgcagcactttgggaatccaaggccggaggactgcttgagcccaggagttcaagaccagcctgggcaatacagcaagaccccatctctaccaaaaaaaaatttaattagctgggcatggtgctgtgtgtatatagtttcacctactcaggaggctgagatgggaggatagcctgagtccaagaagttgaagctgcagtgagctgtgatcgcaccactgcactccagccttggcaactggggaaagaccctaactcaaataaaatttaaatatatatatacacacacacacatatacacacacacacacacacacacacacatatacacatgtatnttttgtaataaatggataaacac

SEQ ID NO: 1567 - DNA, 459 bp, Homo sapiens
aaactgcacctcactggctgggaatgaggatatcttatggaagattcttatttttggaactttttgaactctctctgttggcttctgaaagctgaatgctctttcaaaggacctgaagatttcttttgtcctcagttacattgagcccacatttatgaggcactggtaaaacatttctgcaggagggagttatgtgcattgttcctcttagagaaacattgctcacactaactcctgactgcatgcattttgcaaatgcacagctcagtgagtgtgtcttcccgttgtttgtggtttacaatcctgcaagaaatggctttctatgaggcaaaatggataatggccttttattttaagttacaaagagttgggtggcaagggggtagggaaggcaaccctaaatgctttgaatgaattattgaattgacatggtccaaagtgacatttctttttaaaatg

SEQ ID NO: 1568 - DNA, 528 bp, Homo sapiens
gtaccaggggaatctatacctgaagcattactggagtcaagaaatttgactatggtgttgctgggcatgtgtttccttgagtatattatgattggaattttcccaccttcttgcattttgaatatatgccagcatttctccaagatgtatatcctagagcaaaatttctgggccatagacagagtcttgctctgtcgcccaggctggagtgatgaggcccgatcatcactccacctgggctcactgcacctccgcctcccgggttcaagcgattctcctgcttcagcctcctgagcagctgggattacagagcccctgtcatccagactggagtgcagtggtacaatcccggctcactgcaacctccacctcctgggttcaagcgattctcctgtctcagcctctcaagtacctggaattacaggcatgtgccaccgcaccccatgtaatgtcccgatcttgatggatgcactctggttatagaaatgtcctcattttaaggaaatacatgccaaagtaagtaaaggc

SEQ ID NO: 1569 - DNA, 296 bp, Homo sapiens
gttcaactcattgccacttcctgtagctgtcttagtgacccttcaggccagaagcagatgcctgtgctgtgtaccatgcccctcctgctgctgaactggagagaaaacgtggctggcagcttttgtttcttgagaagttccgaatcttttgcatctggtgctgcgagaaggttcacctggttaaacatcctcaagtcagcagcacagctccttctggaaggcactttaactggatgggatcctctcactgtagacattgctacctccctttcctgaaataaagcctgctccagagc

SEQ ID NO: 1570 - DNA, 410 bp, Homo sapiens
  misc_feature 354: n = A,T,C or G
gatgaatggtcagagctggtcacaagctgaaggtggctcctccagtggctctcacaaacccaaccccctccatgtcatcgcaaaggctgaggagatcagtatttcaccacacctttgtgcttcacttaggtatcgcaaggaaggaaaactgtctccatctgaagaggacatagccatgtatctgctttgttctcttcttgatttccacgttccccaaaatgggcagggctggcttaaaaagcaatggagaaaaagttctggagatggatgatggtgatgttctcacaacaatataaatgtacctaatgctacagaactgtacacttaaaaatgcttaaaatggcaaattttacnttatgtatttttgactctctgtctcccccaaaaagcaatgaaggctcttccttttc

SEQ ID NO: 1571 - DNA, 357 bp, Homo sapiens
  misc_feature 137, 142, 238, 290, 320, 329: n = A,T,C or G
gggcattcagataaagccatcatatcccctgtgacctgcacgtacacatccagatggccggttcctgccttaactgatgacatttcaccacaaaagaagtgaaaatggcctgttcctgccttaactgatgacatggncttgngaaattccttctcctggctcatcctggctcaaaagctccctactgagcaccctgtgaccccactctgccgccagaaaacaacccccctttgactgnaattttctttactacccgaatcctataaaacggccccccctatttcctttgntgactctttttttggacttaagcccactgnattcaaggngaaataaacaagctttatttgttacacc

SEQ ID NO: 1572 - DNA, 219 bp, Homo sapiens
tgaccttgggatctcctgaaggaaaagcattggagtagaagtaagagctgactgtgaaagcctgaggaggagctgccttattgttaaggggtagcaagaagcccaggcgtggcagtccacgcctgtaagcctagcactttgggaggccaagatgggaggatcgcttgagctcaggagcttgagaccaccccgggtaacatagcgagacctcgtctctac

SEQ ID NO: 1573 - DNA, 401 bp, Homo sapiens
agttgagaaatagacggtccacagcggacaacttagaatggaataagggagatgtgtttgaggcactaccattggaagatgtgctggggagaagcccagcccagcaacatgcggcaggaccacatctcggcagagctgaagacagagacgttgcagcgacaaggacaactggcatgcctcacattcctcagtgttgaaaacaataaaaggagggggaatgagagaaaaatcaaatttctacgaagagatgtcagcagtaaatttaatgcaggtgcaatattctccaaacaaaggacgttttgtttctaccgtctgggctctgtgaaaacctgctccacctcctccttgctatgtgttttcctttttatctgtgtaaggtagattaaaatgttgataccctt

SEQ ID NO: 1574 - DNA, 387 bp, Homo sapiens
  misc_feature 18: n = A,T,C or G
ctgaggactgtatcgagntacaaacgtcaccagcaatgaatgaaagtagctgatgccccacatcctcaccagagtgagtttcatcactaagacaaagcaaaacagccggaagcagtgactcatgcctgtaatctccacactttgggaggccagcgagggcggatcacttgagctcaggagtttgagaccatcctgggcatcagacctcatgtctacaacggaaaaaagacatttagccaagcgtgttggtgtgtacctgcagttctagctccttggggggctgaggtgttagaatggcttcagcccgggaggttgaggctgcagtgagctgagccgtgatcgtcccgctgcactccagcctggatgtcagagtgagacccttgtctc

SEQ ID NO: 1575 - DNA, 331 bp, Homo sapiens
  misc_feature 207, 272, 274, 281, 299, 315: n = A,T,C or G
aataaaggcaactgctgggtgtgataagctcgtgcctgtagtttgggaggccaaagcaagcagatcacttgagccccggagttggagaccagcctggataacatcgcaaaatcttgtctctacaaaacagacaaaaatgaggatcgcttgagcccgggaggttgaggctgcagtgagccacgtttgagccactacactccagcctgnataactgagcaagaccctgtctcaaaacaaaacaaaacaaaataaacaaaaaaggccagcgaggncnattcagnttggacttaaccaggctnaacttgctcaaaaggnggggactacccaggaa

SEQ ID NO: 1576 - DNA, 151 bp, Homo sapiens
agtctcgaactcctgaccttgtgatccacccacctcggcctcccaaagtgctgggactacaggcatgagccaccacactcggccaccttcactgattttttcctttcatatttctctttataagtcttctattaaaatgaaaatgcttcag

SEQ ID NO: 1577 - DNA, 305 bp, Homo sapiens
aaaaaggaaatgtgatcaacctaaacaccaagggaagactgtgcatcatctcatccacaagacaaacaaaatgcctcttccagctttgttacaggaaaaatcacagatcaataagaaaagctgatgagaaaacaaagcaaccagaaaaaggtggcaaacccacactgtgtatattgagaaatagaactgtcttcaattagaacaacagatttgccataatccataaaattcatgttatgagagtttgaagcagttatgtacaatgttttatactacaaagtagataaagaccctccatcccacct

SEQ ID NO: 1578 - DNA, 329 bp, Homo sapiens
  misc_feature 268, 275, 286, 289, 291, 305, 307, 310, 312, 314, 316: n = A,T,C or G
aataaaggcaactgctgggtgtgatagctcgtgcctgtagtttgggaggccaaagcaagcagatcacttgagccccggagttggagaccagcctggataacatcgcaaaatcttgtctctacaaaacagacaaaaatgaggatcgcttgagcccaggaggttgaggctgcagtgagccacgtttgagccactacactccagcctggataactgagcaagaccctgtctcaaaacaaaacaaaacaaaataaacaaacaaaaaaaaaanggccagngaggccaattnagntnggacttaaccaggntnaantngntnaaaagggggggac

SEQ ID NO: 1579 - DNA, 443 bp, Homo sapiens
  misc_feature 424: n = A,T,C or G
gaaggacacttctataaaagacggagttggttgtacttcccatgaaaccattattgaagacacacatttgcataacagcaatgagagaaaaagtagattcccgaggagaagcactggaaattaacatacaacataaatgtgtcataagaaaaagttgaaaattgtggcttctaatgagttatctgaaaaacacttaacatgagatacatctctcttaataaattgttaagtgcactggacaatattgtcaattataggcacaaggctgtacagcagatgtctagaacttattcatttcatgtaactgaaactttatactcattagatagcaacttcccatttccacctcttcatggcccctgggaatcacctttctttctactctctgctgctatacatttggctactttagagatctcatacnaataaatagaatcatgtgg

SEQ ID NO: 1580 - DNA, 352 bp, Homo sapiens
ggagacaccacctctttgcttctccaaggctgtttgctgcatctgaaaagacaatctggaacaagaggacagtcaggccagccacagtggttcatgcctataatcccagcactttgggaggccgaggcaggtgaatcacttgaggtcaggagttcgagaccagcctggccaacatgaggaaaccctgtctctactaaaaatacaaaaatcagccgggtgtgatggttgcacctgtaatcccagctactcgggaggctgaggcaggagaatcgcttaaacccaggaggtggagattgcagtgagccaagatcatgccactgcactccagcctggtgacagacgagactccgcc

SEQ ID NO: 1581 - DNA, 268 bp, Homo sapiens
gtgctgaatccaacagcagtccctactaagcttcctgcacagattctgtttcctggagaacctgatgtacaacagttaaagtgcagagaaaccctctgccaaactttggtgtgctttaaaagttatggcagtcaggctccctttactgtcataactggaacacctttcacttttcaaaagagctggtgtatctgcttgctgtacaactacaaatatatacttttgattaagaaagttgagaaaaaataaaagcagtttaatttagccc

SEQ ID NO: 1582 - DNA, 179 bp, Homo sapiens
gtaacccttcagaatgttgaagactgttgtacaaagtaattaatgagctgccctggatctgaggcaagcgacggaagagtcaagatgactaaaagtcttctgataaagggtttctttaaggaaaagaaaatcccacaatgcaaccagcaatgttaatcttcaataaatacgctgttaat

SEQ ID NO: 1583 - DNA, 362 bp, Homo sapiens
gactggtgcccttacaaggagagtaagtaccacctcatcagggccaccctcatctaccagagagctctccctctgtccatgggcacacagagaattggccatgtgaggacacagtgagaagacagccatctgcaaaccaggaagagagtcctcaccagaacccagccctgccggcaccttgatcttggacttccagactctggaactgtactaaccagaagttcaagctaggggttggagaaggaaggtcatacatacagaagcaagaacctcaacccctagaactgctatgaaaatcaaacaaaatgctatttgtaagtagtcttcctgtgctggactaaattaaaagaactttgcagctc

SEQ ID NO: 1584 - DNA, 431 bp, Homo sapiens
  misc_feature 404: n = A,T,C or G
tctgactttgagccaggacttgaagcagacactatggctcatgcagaaaagaaacttcttcccacaagactgccagcgaaattttgcagactcaagatgttcggagagtttggacaatcatcacagtttttggacgcctatctgagaccatcttctgtgaagtttattcagctcataagtgtgaataaaaaattgctaaatgtgaactcaaagagacagtgcagttttacatctgagtccactgaatgcatcacagaagcagcatgtgcagcaacaggagtccaatagcgtcaaccaccaggaaacaaggatcacggagcatgtgagaaaatggtaattgagaaggctgatcaaggaacacactaaaattggaggcatgaaacacttggcgaaatggtcccatnggtccatctggggatcctgggaacaag

SEQ ID NO: 1585 - DNA, 216 bp, Homo sapiens
  misc_feature 71, 134: n = A,T,C or G
gtttggaatccaaccaccaagttctgctgaacgaatgattttataatcagctaactctgcccacgatgganagcaaaggccagtttcacagacccaaatacatttggcctctgaacgacatggatttgaactgngaggatccatttacatgtggattttcttctgcctctgccgtcccagagacagcatgaccagccactcatcctcctcctcctc

SEQ ID NO: 1586 - DNA, 260 bp, Homo sapiens
tttgcaaatgatttccaaatataatttctcatcggaatctcacaaccaccaaatacgaccaggcattattcatctgattttatagatgaggaaatcaagggtcagagaagtgatgtgacttgcccaaggcccacagatggtaggtggcaaagccaggacttggaatccaagataaagaaaactcagtgggaaggagaagtttgtgattaaatccaattaaaggaatagagtaaaataaagaacacagtaaatttctcacc

SEQ ID NO: 1587 - DNA, 265 bp, Homo sapiens
atgatgaaaatgatcctcagaggagcattgttaataatcaaattaccaaagaatgatgcctactctgaatccagatgtctgacttcacaggacaaaaccactgcatttactgttctcaaatgatttattttaagaatttacgcttctaaatttaatccctgagggtaatgggttatgtcttaaaatatgtaatggaacattaaaaaaatgaattctttcttgcttggtttcggccaaaatgtaaataaactgaatatcaaatact

SEQ ID NO: 1588 - DNA, 326 bp, Homo sapiens
attccctctgacctgctgcccctggcctttctcctgccccagtggggctttagcacaactgaccgctgctttcctgcgctctgtggccagggaactcatgtggtgaagcactctggagtttggctttgcaaagaagtgaaatctacaatgcaaatatccagatctccaaaccctggtcaaatggcagtgactgaagctcatgccccacctcccagctgtgcaaccttggggcaagtcacttcacctctctgggcttcaacttcctccttggaaagacagaatgccaacatccatcctgcctcttgccaagatgttttatagactgc

SEQ ID NO: 1589 - DNA, 367 bp, Homo sapiens
acggagtttcaccatgtcgtctaggctcatcttgaactcctgacctcgggtgatctgcccaccttggcctcccaaagtgctggaattacagaagggagccaccatgcctggcctggagtatataagtgcttaagaaccttgttcaaataagaaggaaccagaaaacccttcgttatagcaattgctctctcttgaaattgctccagatccataacatctctcttcatgttcgggatgtggatttcatgaagatattttgaaggtgctgctgagacaatggggcttttctatataaacaaagtttttattagcttttttgcttatctggattttactgctaattaattaaagcccaatactttttcag

SEQ ID NO: 1590 - DNA, 371 bp, Homo sapiens
ctgccctgtgtttgacatttggtgattgtattcctttcctgggacagccgtaacaaaacgccacaaactcagcagcttcaaacaaccaaaatggattctctcacagctctggaggccagaaggccaacactcaaggtgtactgggaccgtgctccctctgaagcccccagggaagaatgacttccttgcccctgccagctcctggtggtggccggcggtcctgctcgctccttggcttgtagacacatctctcccatctctgcctccaccaccgcgtggccttctctgtgtgtctgtgtccagatttccctcatataagggcatcagtcattggactggggccatcctcatacaacatgctgttagccttg

SEQ ID NO: 1591 - DNA, 415 bp, Homo sapiens
  misc_feature 382: n = A,T,C or G
gtcaaatctggatactctctgctgaagacaaccaatattaatgaatcacactacagagtcattgtctacgatcccaaaggaaacaataatgcgagtacaacaaattcttcttgcaagagaaaatcctgcaaaactacttaacagaataacactggtcaatgctctaatcatacatttgttaaaccttatataatgttttcaaatatgcatgcaatccaggtgcagctttaactaaaaattcagtctaattttattttcagtttaggttcttggagcaaacatctttgcataaatatttgcctcactactagcctctctccatataagaaaccatcatttctcttaaaaaaaaaccacaagttgttttatttccacaataggnatctaaaagatcatttttaaaaaaaggcagctt

SEQ ID NO: 1592 - DNA, 407 bp, Homo sapiens
  misc_feature 26: n = A,T,C or G
gtggaggtggggaggagcttttgcangcctgttgaactaagaagctgtgacagggcgtgagatatgtcagcaatgctggtggtgccagaggtttctgaagggtctcactgtggtgcctatgctggagtgcagtggcacaatctcggctcactgcaacctctgctttccggacttaaacgaccctcgatcctcccacctcagcctcccgagtagctgggaccacaggtgcataccacgaagcccggctaatttttttgtgtttgtggtaaagacgggcgtttcaccatgttactgaggctggtctcaaactcctgagctcaagtgatttacacgcctcagcctcccaatgtatattttctttgcttccaaaatgattgttgagagtaaagcttttgatgtacacatat

SEQ ID NO: 1593 - DNA, 306 bp, Homo sapiens
  misc_feature 6, 102, 263, 279: n = A,T,C or G
agtggntgaggaattgtcaattgcttcactaagtaccattaatacggcaagatagcagtaatcagttccacagaagtcatatcattctcaccctgggattgntaagatctagacatggtcttgctgtattgccctcaaactcctggcctcaagtgatcctcctgcctcggcttcccaaattacaggctggacttcatgtggtatagcatttcttaaaagtctcaaagaagtcaactctgtaatataaagtcctcatatgaatngattctaagttgtagncagccactaataaacacacatgcttac

SEQ ID NO: 1594 - DNA, 209 bp, Homo sapiens
  misc_feature 4, 73: n = A,T,C or G
ctgntgcgctcagccttgaacaccctcccgaccttggggctctgctgccccacgcggagcccccatttcaacngatgcagacaccccaaagccccttcccaacagcccgaagagaagccctcctctgaagagacagcagagaagcagagccccctgggacgccccccaagacctccacgtctccccagcacccggcgggggggtggtgc

SEQ ID NO: 1595 - DNA, 229 bp, Homo sapiens
aaggctaaagctctataaccattgaaagctggctgggggaaaagaagaagaggcaaaaagatcaactgaagaataaactgctgtcattggcacaaaagaataccacaaagattatttacaaaactcgaatcaggagtagaacagacctccatgtggaagttcaattatgctaagaggaaagaggaaaggggaagagtttacagaaataaattaatgatgatgataaact

SEQ ID NO: 1596 - DNA, 308 bp, Homo sapiens
  misc_feature 5, 286: n = A,T,C or G
atgangtgctgtgctggacaacgctgcctttgggcttcggcttggaccgtggggaggcagagcaatgatgttgttaggattaaatgacaaccagccttctgttatttctggaagattttggaacttccagagaaggcaggagtgagctgtcggggaaggaacgacgtctccttcaggaattgttgccagcacttgggtcatgaagcccttctctgtgtctcctccgactggaatactcatcacgtcctcttagctgataacaatagctgactttaataagtgtagngcttcctatatatgtgtatgtg

SEQ ID NO: 1597 - DNA, 339 bp, Homo sapiens
  misc_feature 80: n = A,T,C or G
ttcatgaaatgggaagattttgctggattatctggttgggctctaaatgtattcaaagtgttcttagaagaaagaggcanagaaagagctgacacacagaagagacggtgatgtgaagacagtggagagagagagatctgaaatgctgcccttgaagactggagtgaagtggccacaagccaaggaatgcctgcagcctccagaagctggaaaagacaagcaatggattctccaccagatcctccagagggagtgcagcgctgccaacactttgaactcagcccagttataattattttggacttctccagaactataaaagaataaatatttgaaacc

SEQ ID NO: 1598 - DNA, 75 bp, Homo sapiens
aaagaacgttttctggagaaagatacgaggtgccacatcagagatacttattaagaccaataaaccaaaatacgg

SEQ ID NO: 1599 - DNA, 489 bp, Homo sapiens
atatttcctgaacacctactatgtgctgcaagtactgagatccacagtgcaatccggcagccagggagcacccccgatcacagacactgtggccccgcaatggatgggcgcttccattgctggagctcacttttcctgctctaactgcaggagctgggaatttgaactgtttctctcacttctgggtcccagcatttagaacagggctccactcacagcagccactattgctgaagaagcaaatcccgcgggattgcttgagtcctggcacgtgtgaaatgcctgccaagaactgcagaggacagagacacagtgctccaaaagggttgaatggcaactttatcatggacattttggtgattacaatatctacatttcctggggggtctcagaatcacagaaattatttcaagttagtccgaggctgctcaacgctgaggtcaaaacatctgagagaaaaggttaagtaaaaaatctggttgtttctat

SEQ ID NO: 1600 - DNA, 390 bp, Homo sapiens
  misc_feature 58, 67, 85, 102, 128, 154, 159, 161, 165, 187, 204, 255,335, 354, 355, 360: n = A,T,C or G
gaaagccagctgccatgtggtgagtgtcaaggcctctgagcccaagctaagccgtcanatcccctgngacctgcacgtacacatncagatggccggaagcanctgaagatccacaaaagaagcgaaantagccttaactgatgacattccaccntggtnantcgntcctgccccactctaactgagntgatatattctcccctncaccccacttaagaaggtactttgcaatattcttcccactcttgagaatgnaaatttgtacacctatccccaaacctataaggaactaatgataatcccccccaccctttggctggactctctttttcaanactcaggcccacccttgcnnccccnaggtggaaataaacagcccttgttgcttca

SEQ ID NO: 1601 - DNA, 361 bp, Homo sapiens
  misc_feature 34, 46, 56, 58, 60, 63, 64, 65, 67, 69, 78, 80, 93, 94, 95,101, 108, 148, 161, 164, 169, 218, 220: n = A,T,C or G
ttgacgggcagtaaatattcaagacaatgatganggcatcatccantgtgatattncngntgnnngncntaactgaananattgcaccacaannnaagtgnatatggnctgttcctgccttaactgatgacatgggcttgtgaaattncttctccaggctnatnctggntcaaaagctcccctactgagcaccctgtgacccccactctgcccgccananaacaacccccctttgactgtaattttcctttacctacccgaatcctataaaacggccccacccctatctccctttgctgactctcttttcggactcagcccacctgcattcaggtgaaataaacagctttattgctcacac

SEQ ID NO: 1602 - DNA, 433 bp, Homo sapiens
  misc_feature 375, 377, 381, 393, 395, 409, 418, 419, 420: n = A,T,C or G
gggcattcagataagccatcatatcccctgtgacctgcacgtacacatccagatggccggttcctgccttaactgatgacatttcaccacaaaagaagtgaaaatggcctgttcctgccttaactgatgacatggtcttgtgaaattccttctccaggctcatcctggctcaaaagctcccctactgagcaccctgtgacccccactctgcccgccagagaacaacccccctttgactgtaattttcctttacctacccgaatcctataaaacggccccacccctatctccctttgctgactctcttttcggactcagcccacctgcatccaggtgaaataaacagctttattgctcacacaaaaaaaaaaaggncngggnggccaattcagntnggacttaaccaggntgaacttgnnnaaaagggggggac

SEQ ID NO: 1603 - DNA, 387 bp, Homo sapiens
  misc_feature 362: n = A,T,C or G
gttaagcactgggaggcacagatgtatgaggacttgccatctaggagtcagagaatcagcacatatcttgtcatgtcatagctgaagagctgccacctagacctgttcctgctgcttcactctggttttcccatggcccatatggaagggaaccagggttgggctaccaccattttttgctcccagattggaggatgggtgaggcctctccatcccagcttccctggataacttagtttaagcttatgacacatattctctgaaaggcaaacccatgaggtgtattcacaaagaggacatcaaatcccacttggagtcttgtgtcattaaaccattacagtcagccctccatatccctaagntctgcatccatggattcaaccaccc

SEQ ID NO: 1604 - DNA, 327 bp, Homo sapiens
gtgtatcctcacccttctacgctccatggtgatcttcctgccaagatttttctccaatcaaaagtccatcttccactttctctttggaaaaagaatgcgtaacagtctcactactgcccatcacctattccctttcactgacatctccccaagcccaactatcattttctgcctttaaaaaataactggaatttatataaatcaatccaacgcctatcatagaccttggttcacagtatgcattaaaatatgtattggttgatcattccttctgcagtgtcaagcactgtgccaggcaacagtgattaaaaataatgaatgaaaccc

SEQ ID NO: 1605 - DNA, 287 bp, Homo sapiens
  misc_feature 6, 78, 189, 208: n = A,T,C or G
attttncatatggcttagaagaaacaagctgacatgttgtgagctacccaagaagagagccatgggacaaggagctgngaccagtggccagcaagaaactgaagcccttagtttaacagtctacaaggacctgaacactgccaacaaccacatgagcttggaaacagattcttcctcagtcaaggtttnagatgagaacttcatccanagtagcactaggattgtgctgtacctggtctcctgacagagaatctctgaaataataaatgtgtattgttttaagccag

SEQ ID NO: 1606 - DNA, 129 bp, Homo sapiens
actgtatcccagccactatttttccctcaacgtcactaaatgcaagggaataatgaaaccacaggagagaaaaaagcagctgtctgaataaaagaagaaagaggtagatgcacagaaacagacggacat

SEQ ID NO: 1607 - DNA, 462 bp, Homo sapiens
  misc_feature 400, 422, 432: n = A,T,C or G
tttgccaaccatggattacagagcaaacaaaacaaaaccccaaggacaaaataaagaagcagaacaccttgaagaaagagctgattccaactctgaagtgggaaatgtataggatgggcgtggtagaagatcagaaagctatcaaaaacaattgaggacatgttcaaagaactcaggtgacaaaagaggatcccactggccaaaaatgggacaatgaagtcttatccatcctcctctttactgtggtccccagaactgtgtcttgaacatggcaaaaacttgttcagctgtcatgagaagttgagtgatgagaccttgagcgggaatcatcaatgaaagggccaaggagatgagatggagcattgtaatcaacaaaagtgcttaacccaagaaggggtgncccttatttaattacctttganaatgcttgtnttttaacgttacaaggtatggcaagacaat

SEQ ID NO: 1608 - DNA, 257 bp, Homo sapiens
acatgccatgtgctgggcataggaagtgctgtttcagccaccccaaggagcaaccatgagtccagcgtgcctgctcgtcacacctcctcctacccctgagcgccacttctgagttgctcatcagcatccccagctcccagatggctgcctttgtcccctgctttcacagcatggatgtgaaaggagcagtagattaagaaagacccaagataacccgtgaaagatattcactgtggattgacaataaaagccattag

SEQ ID NO: 1609 - DNA, 91 bp, Homo sapiens
agacaatcttactatgttgcctaagctgatcttgaaatccggaactcaagtaattctccccctcccagagtgctaagattacagttaaaag

SEQ ID NO: 1610 - DNA, 205 bp, Homo sapiens
  misc_feature 23, 24, 34, 51, 58, 66, 67, 68, 96, 118, 134, 173, 174, 189: n = A,T,C or G
aagacaacgcgaaaacagaagcnnggatcagagngatgcagtcacaaattncacaatnccagggcnnncaacagcagctaggagaggcaaaaatangaaccctgattcttccctgcancccctggcaggagtgnggttctactggggtttggacttctaacctccaaaattgnnaaagaataaatttcngttgcattaagtcctc

SEQ ID NO: 1611 - DNA, 464 bp, Homo sapiens
  misc_feature 20, 77, 79, 85, 119, 153, 155, 156, 434: n = A,T,C or G
cccttgtgtttttggagttntaaaactgaagccatgtggtcacgtttaaatggcagagtattaatcaactgaaaatnantatttntgaaatccaagggcaataaaaccctgtggaagcncccaccccctacccattactcaaattcagacacnannagactgcgtctgtcttcatcctcaccatgatgacccttcatttcaagcaatggaatatttacagcatcatagtggagcttggggtacaagtggggcatggtgctgatagccctgtgttcggtgggacactgccctggtggtggcaactggtgcatgcttcagttctcctccttgatcctcagccacgctcaagtcggtgtttgctgcgcaactcagcgtcgctgctgcccctgctaatgagaattacattgtcatgtaataagtaccttccttgagtncatgaaaataaaaaaaaagtcttaaaaagg

SEQ ID NO: 1612 - DNA, 288 bp, Homo sapiens
gtgagaagaatacttgcatgcttctgctttggtcctttggcacagcagctcttagaacataactgcctcactcggagaaagctggagagacccacaaggagaaaaaaggaggctcccagccaacaaccagcacagctttgcagcaaaatgagttggccatcttagaagtgggctggctagatcccgttgaaccaccccacctactcttcctgaaacagacacaagccatcccgctgagccctagtcaaattacagattcatatgcaaaataaatgcttattatttttt

SEQ ID NO: 1613 - DNA, 419 bp, Homo sapiens
  misc_feature 22, 131, 289: n = A,T,C or G
ggggatatttttttttcataanacctgcctgtgatgtttctctgccgtgaatcatgtctatatcctcacaaaggataaaaaccaaagccactagagcagagtctttggatttttctgaatatggaaagcanccatgcattacattgaagcatattccaacgtcagggaacagagcactgcttcctgtccatgtcaccgcaaattccgtgctgagtgttactgcgccaaaggacatgttaggatgccacaacggttctcatctggtccgtgatactcacaggctgatgtngtacactagaaagggagggctctttccaagttacagaacttattttgcaatatttcctgggaaagaattctgctacaagctttaatcaatgtaagaaatgctgtaactacattaaagtaaactgtacatg

SEQ ID NO: 1614 - DNA, 469 bp, Homo sapiens
  misc_feature 456: n = A,T,C or G
aagcgccctcgagaagtgtctaaaggagacaagttgatagccaaacaacagttttggattcactgactgattatgaaagaagcagtagactggtatcaagaatcagtcagcatgttcttgagcatcctgagggcagggaccagccttgacgacccaccctggcagaggctccccagcagcagctgctctgacgagatgtgctcccaggagagagcaacactgtgtggggaaagcccagctctgagaggcggagaaaatgggaagatcaccacctaggtgggagggcggagaaagggataaagaggagtacaaaataaagatgaccttcttgcctaccagcaggctgagaacagatgggggagatcaactgttagaaatattttagagtgcagcaaaccaccatggcgcatgtgtcctgtgtacaaacctgcacgttctgcacatgtttcccaaacnttaaataaattaa

SEQ ID NO: 1615 - DNA, 349 bp, Homo sapiens
  misc_feature 220: n = A,T,C or G
atcccatggagcggatggagcacatgagccaagggtaggcgggctcagtaaagaaaagcccaaatctctcttcagctgtaagttggcccttcactgggctgcactgaccagacctgaacctgactatgtcatcatgactgatgccaatgggttcatatgaccattgccattggtcaccgtattagatatggtgacatcactttacacacttctgagtctntccaggcaacttgtatgtagtgtgcagtctgaagcaatgtctaatctctcagaagaagttctcaaaggaatgtttccaaaaggaccatttttttccgatatattggaaaataaaggctcacctaaaaat

SEQ ID NO: 1616 - DNA, 476 bp, Homo sapiens
  misc_feature 459: n = A,T,C or G
gaagcacctgcagggagcaagctctcgaggaatttctaattaaggacttcttgccaaaggcacatcaccacactgacatgcctcatgacctgggtaaatacaagatggaaaaattgagacccagggaggttatttaccatgccagaacttgaacccagtaaagatgggctttcataatgttggccaggctggtctcgaactcctgacctcaagtgatccttctgcctcagcctttcaaagtgctaggagtacaggtataacattggacaaaagaaaaaaaattgagaacaggggaaagaagtttccattgtctctgaggccttccataagagcgaatcaagaactgaccttatttctcagatctggatgtaaacatgtactctttctgcctcctgcatctgtgacctcaccatgcccagcataagcttatgctgaccccaaagtgtggcagtattattncaactcaacaagtttgg

SEQ ID NO: 1617 - DNA, 448 bp, Homo sapiens
  misc_feature 372, 397, 398, 399, 400, 401, 402, 403, 404, 405, 406, 407,408, 409, 410, 411, 412, 413, 414, 415, 416, 417, 418, 419,420, 421, 422, 423, 424, 432, 433: n = A,T,C or G
attgaagatgtcctggatagtgttatatatatgagcctgtgttttcagactttatgaacaccttgaaatgagatagaaagtcatttggagggacaactgaatgacacacttctgttcacaggtaaccaggaccacaaggaaccacaacagggaggattacaggattgtgttatcacctggaaaatcttgagataggaaagtacattttccaggttccttcttcctctggcttccagacaggttcagccaatggaaaacactggtggaaaattgaagtacaggaggaaacaagaagccaaagttcattgaaaagttcaggaaagaagaaagaagaattcattgaaagaagaaaagaacagcagtatggcaggngataaaccccaagtttttgggtccnnnnnnnnnnnnnnnnnnnnnnnnnnnnaaaagggnncgggggggccttttt

SEQ ID NO: 1618 - DNA, 221 bp, Homo sapiens
ccaaccttccagccagaggaggcctcgtgacccagttctacccaaacagacccaaacagaagcacctgacaagaaagtggttatgtttctagagctgcatcagctatttataaccatgatggcaagtcccagagaactggtcttgccatcactgagcagttgaaccaataccagcatcaccaactttcctgtatatgagaaaaataaactctatttctttt

SEQ ID NO: 1619 - DNA, 389 bp, Homo sapiens
gaacccccggagcttctcgcatcgggtgggaccggcatccggtgagaccgcggtggctctctggggctgaaaattccaagcagagtagcccgaggaatccagccatccccgagggttcagaaatgcaaatcagggctgtgtattcacagcctggactggagatcgaccaaaaactatgcagggctcacccttgcggggcggcggctaaatttaggaaaccaaccatctggagaatgcaggcatcagaagcccctgcagctaggaggatcaatttcaagttcatttttattcactgttcatagatctcccagtttttcctagcgtgttcaagctggaaaggatttcagagattgtgtcacctagatttattttacagaaggaggaactgt

SEQ ID NO: 1620 - DNA, 261 bp, Homo sapiens
aagacaaggccgtggctatgttgcccaagctggtctccaactcctgggcttaaacgatcctcctgccttggcctcccaatgtgctgggattacaggcatgagccactgtgcccagccctgaaacaatattcttgatacataaagaacttctgtaagtcagtaagaaaaacactaacaatgtaaatattaaaggacataaaatagctaatgtacaaaaagtagaaatgttacagttaataaacaggagaaatgcttaacctc

SEQ ID NO: 1621 - DNA, 454 bp, Homo sapiens
  misc_feature 373: n = A,T,C or G
gtggggtctttcagtggagaagtgtggagaaggaaaggaggacctggactgcaggtggaggaggaccaaggaggctcttgtaatatcaagatcaagcgtgataagatggggttttgctatgttgcccggtctggtctcgaactcctggggtcaagtgatctgtccacctcggcctcccaaattgctgggattacagacatgagccaccgtgtgcagcctgcctctgtccttctgaaaaaaagatggtacagtcaagatgacctagctgtaacctggctactagaggaccaaggagaaaaataaacttctaccacgctttcgaaaacaagcactcaaactcaggagatacttgattgaagttgaaaaaaggggngcattccccaaggcagtaccctcatgaatgggattagtgtcctttaataaaagagacccaagagaggtcccttgctccttc

SEQ ID NO: 1622 - DNA, 238 bp, Homo sapiens
accctgaatgccaacaaccagtttgaagacccccacagaggaacggatcagcatgagaatgcaggtggttcacctccctgtcccatgttcaccctgcatttttcgaccaatcaacaaccgccaagcctgcccctttccaaaacccttaaaaactctaacccaaactcctcagagagatggatttgaggtttcctcccctctcattcggtggccctttgattaaacctttctctgctgc

SEQ ID NO: 1623 - DNA, 208 bp, Homo sapiens
gacatccttcccattgacactggaggggccaactacatgttttaatcagagcccacagctgcccacacccactgcagagtgagctactctccaccaaccctgcagccctgaagtttctgtgaccactgaagaggcctgttttcagacttagggtcaaagtgtgggtgacctccaacacctactgtagtgaaggaataaatgtcaatag

SEQ ID NO: 1624 - DNA, 384 bp, Homo sapiens
  misc_feature 22, 363: n = A,T,C or G
gcttcactgagaagatgaaccngccgatgaggtgtgcagagaactttggctgcacaagttaagaggaagaggctgagtctcagctcagagagtgctggtaatgccaagcacagcagagctgccagagggatctacttggaatctggggaggccctggggagactaactggtacaatttaaagagatgcaaagcaaatgatatgcggggcaatcatgtgaaaagcctgctgccttacaggatggactccagctgctcagtgggacgggctgttgggggctgggttttggtagggcaagagggccccggatggagtgatggacactctaactcactactccgccgtccaatacagtccagattgnttaacaactcttaaaaataaa

SEQ ID NO: 1625 - DNA, 356 bp, Homo sapiens
  misc_feature 184: n = A,T,C or G
acggaatcttgctctgctgcccaagctggagtgcaatggcacgatctcagctcactgcaacctccgcctcctgggttcaagcaattctcctgccacagcctcccaaccagctgggattacaggcacccacgaccacgcccggctaatttttgtatttttagtagagatggggtttcaccatgtnggccaggctggtttcaaactcctgacctcgtgatccgcccaccttggcctcccaaagtgctgagactacaggcatgagccaccgcgcccagccaagcagacacttttctaatacattttctgttcattgtacaaattaattcttaatgaatgaagaaattattttaatctac

SEQ ID NO: 1626 - DNA, 252 bp, Homo sapiens
gccctgcactcgatggatcagctggcaccacccagatcaataaactggctcatctggtcttgtggcctccatccaagtaccaactcagtgcaagaagacagcttcgaccccgtatgatttaatctccaacctgaccaatcagcactccctactccctggccccctacccaccaaataatcctcaaaaaaacccagtctccaaattttcaggaagactgatttgagtaataataaaactctggtctcccgtcc

SEQ ID NO: 1627 - DNA, 456 bp, Homo sapiens
  misc_feature 338, 362, 386, 407: n = A,T,C or G
tgtgaggatacaactgggaactaaagctggaagatgccagacattcagcagggagttccctcatcagcagctggctaactggggaactgaaagtcacaaggcgctcgtttctgataactccatgaaaattcactctgggtcagaaatcaatctttggagttctgaacatgcagcttttctcatgggccttttggagaacaatcagctactcagccatcagagccttttttgctggatggcaggcaggaactgacagcaaaccatcgtctctacaacacgcagaagatcagcaccaagtctccattctccgaaaacatgtgtccatgcagctctcccangggaggtctgcgctgcagtggaangccccaagaagcgtgggaacccancttcatcgcatgaaggaaacncagagttgtacctccagatgccaggcggagcggcgacgtgacgcacggt

SEQ ID NO: 1628 - DNA, 462 bp, Homo sapiens
  misc_feature 344, 390, 392, 411, 427, 435: n = A,T,C or G
atggctcacctgaaatttctgacaacctgcttcagctgggattaatttctttgaagtgaaatcagtttaactgaggaatcaatttgcttccttccatatatgccaaggaaaaactgtacatagacattgacccacaatacctggttgaccacgggatccgcaagagatgtccaaattatgaacttccattaaaaaaaaacggtggttctatggctgcctggaatggccatatttaattgctccccaggataatagcatttattgttaaacttgctagaaacataacaaaaacgtaaatgctaatctttaaaataagcaggactcctatcacatccttctcttgnggcttttttccctatacccctgctttgggaaccggcttgtttggantngaaaaaggctctggaacangggattctcacctcancactgttnacatgtgggacccaaaattttgggaaa

SEQ ID NO: 1629 - DNA, 356 bp, Homo sapiens
  misc_feature 11, 32, 37, 40, 44, 48, 86, 106: n = A,T,C or G
gggcattcagnataagccatcatataccctgngaccngcncgcncacntctcagatggccggttcctgccttaaccgatgacattncaccacaaaagaagtgaaantggcctgttcctgccttaactgatgacatggtcttgtgaaattccttctcctggctcatcctggctcaaaagctcccctactgagcaccctgtgacccccactctgcccgccagagaacaacccccctttgactgtaattttcctttacctacccgaatcctataaaacggccccacccctatctccctttgctgactctcttttcggactcagcccacctgcatccaggtgaaataaacagctttattg

SEQ ID NO: 1630 - DNA, 245 bp, Homo sapiens
aaggagctgagtctccccagaagaggaagtttcaactgagcgattctctgacagaacatcgtggattgagaggaaataagaatgggtgtgcctgctttaggattacacagtgctggacctttgaggaaggagaagcagagatggatagaattgttgtggcagaactgagcttgtatacttggtcctgtggagggtatctactcttcttccagctgcgtagggtaaataaaggtttttgtaaagct

SEQ ID NO: 1631 - DNA, 385 bp, Homo sapiens
attgttcaaagaaacactgggaactttcccctccctgaggaacttccatagatgtacacctttggtctccatcccaaacttgctgacctgtgattgttcatccactgccagccatctctgtcctccacctgcacctgggacctgttgccctgcacccatggacaatctcggcttccatccagctccactttgcgctctctccactcttgaatcgcatgaacccaaccaactggttcatgtgtttatttttcatttccttcttttgttctatgtaagtgtttgtttattttttaacctttttacttgccttgaatcctttttggaaatagatgaggtctaaattaaaattgtaataaataacaccgaacatagcctttttaaaagt

SEQ ID NO: 1632 - DNA, 400 bp, Homo sapiens
  misc_feature 327, 376: n = A,T,C or G
gacgtctggggagctcctgcattaagtcatgaactgaggctggcactgcacagagatggaacctgatgaaacggccccatttgagcgcctgctgtatcgcgttggctctgcttcctgcagctgtgctccaagatgagcctttcagacatcgctccctaatagctccatctcccccagtccaggaggatgcgcattcctctcctcattcacatgcaccacttcaagccatctgcacgctctacaggggacttgccgcctaacatcctaatgtgcaaccccatccaaatcctctgctggaatctcactatttgcaccacttacgctccnggagcgtgaaacagaagggccagtcctcttgtctctttattctaagtgnttaatacagattccatgggcttgg

SEQ ID NO: 1633 - DNA, 216 bp, Homo sapiens
  misc_feature 32, 119: n = A,T,C or G
gtggggtctttcaatctggatggactccgatntaaccggtgtccttacaagaagagaagacaggacacgcacacaaagcgagggtcagccatgtgaggacagtgagaaggcggccgtcnacacgccaaggagagaggcctgggaagaaaccaaccttacaccttgacatcagacttctggtctccaaaactgtaggaaaataaatttctcttgttt

SEQ ID NO: 1634 - DNA, 450 bp, Homo sapiens
  misc_feature 369, 377, 393, 397, 409: n = A,T,C or G
atatgacattggatatgtgtttggacacttctgcccgagcatccatactccaccactcaatagctgctcattcaggctagtaatctcatatgtgttgggacaactgagcttccagaatgaagagggcaaactgctgccagacagagtgtcactgtattgcccaggctggaatggagtggtgtaatcttggctcactgcaacctccgccttctgggggttcaagcgattctcatgcctcagcctcccgagcaggcgcacaacaccacgcccggctaatttttgtatttttagtagagatggggttttgctatgttggccaggctggtctgacactcctagcctcaagtctggtctgcctgtcctgggctnttaaaagncctaggattacaggcntganccccgacccagncctgattttatctcttgatcatctggattaaactgtaccaa

SEQ ID NO: 1635 - DNA, 330 bp, Homo sapiens
gaaacctgccggaattctccttcttcccccgtcttcacacagctgtgaccccgaacccgtggagtatcgctccttgaggggctcctgcagcacctggtacttggccttggtgatatggaccacttgattcaacactcttcctctggttgaatgggacatccctgaaggcaggaccaatggcccgctcattctccagagcctggctcatcatgagcccttgaggtactaattgaaggagtaaattcacattctccttggacatttcctttcactctttctgtgcatgctaatttactttctctagtaataataaatgtcattttgttttac

SEQ ID NO: 1636 - DNA, 236 bp, Homo sapiens
  misc_feature 182, 195, 223: n = A,T,C or G
agaacctggagatctgcccacccctccaccatatgaggacatggccagaagacagtcacctaggaacgaggaagcaggtcctcaccagacaatgaatctgctggcgccttgatcttggatgtccagcctccagaactgtgagaaataaatgtcttttgtttgtaagcaaaaaaaaaaggccngcgaggccaattnagcttggacttaaccaggctgaacttgntcaaaaggggggg

SEQ ID NO: 1637 - DNA, 250 bp, Homo sapiens
ctaccacagcaccctctgcaacttcaaaggagaaagggactcagcacaaatgcccagcaggagagagtggacaaaatggctcttgtcaccaatggaatgctctacagcaattcaaaagaaagaaacacctctacatatcgatggaaataaacaaaaactaggtgcaatgtggtgtcctggatgaatcctggaacagaaggagaacatacgaggagaaactgttaaagtccaaataaattctggaactttg

SEQ ID NO: 1638 - DNA, 313 bp, Homo sapiens
gattttgaagcataaggtccatctgttgggggaaggcaagaagaatcagttcttctctcgagcacggcccattcatctagactcacgcaatgactgtgattccaaaagactgaccaaacattaccaagtgggcaggctactggggacaattccggaaacatttctaggaagactggaagaaatacagtaatctagcacatatgcaaaagaatatcaaaagatgaactgttttcatcagccaacccttatgaatgctaacatgtccagtcctcttacagttcgtcgctaggttaatagaggcattcaaaaattt

SEQ ID NO: 1639 - DNA, 443 bp, Homo sapiens
  misc_feature 376, 394, 402, 411, 414: n = A,T,C or G
gaggaggctccacctgctgccggcccaccaatacttccggctgactgctttgccgaacaggaaagggtctactttctattctcctatattaacaagatcccatgttttaggtgagcactttggtcacccacttaaatgacgacatttctcagactcacttgtagtagaatttatagccatttgatttagttttggcctgtgagctgtaagggaaagtgttcaatgatgcatcaggagagcctccttaaaaacaaaaggagaaagtgagttgagttattttccctttttttttcaccctcttgcctggatcatggtggatgtgaaagctaagttctgataactggcttggaccatgagaataagggccccgttgtangggggggggaaaaattgngctggaanaaagaactngcntctggtatgacttcatggagcttctgcca

SEQ ID NO: 1640 - DNA, 342 bp, Homo sapiens
  misc_feature 184, 207, 323, 329: n = A,T,C or G
acggaatcttgctctgctgcccaagctggagtgcaatggcacgatctcagctcactgcaacctccgcctcctgggttcaagcaattctcctgccacagcctcccaaccagctgggattacaggcacccacgaccacgcccggctaatttttgtatttttagtagagatggggtttcaccatgtnggccaggctggtttcaaactccngacctcgtgatccgcccaccttggcctcccaaagtgctgagactacaggcatgagccaccgcgcccagccaaagcagacactttttctaatacattttctgttcatttgtacaaanttaatntctttaattgaat

SEQ ID NO: 1641 - DNA, 393 bp, Homo sapiens
  misc_feature 220, 358, 365, 367: n = A,T,C or G
atggagtttctctctcgttgcccagactggagtgcaatggcacgatctcagctcactgcaacctctgcctcctgggttcaagtgattctccagcctcagcctcccgagtagctggaattacaggcgtcccccaccacaccagctaatttttgtatttttcgtagagacgggatttcgccatgttgtccagactggtcccaaacttctggcctcaggtggnccgcccccctcagcctcccaaactgctgggattgcaggtgtgaaccacagtgcccggcccattctttctttttcttagcatccctatattagtctgttttcacgctgctaataaagacgtacccaagactgggaaaanttattgntnacaaaaaaaaaaagggcggggggggc

SEQ ID NO: 1642 - DNA, 281 bp, Homo sapiens
  misc_feature 14, 18, 20, 24, 25, 32, 44, 47, 52, 60, 62, 74, 75, 77, 81,120, 146, 171, 251: n = A,T,C or G
cgtacggatgactnccgnangctnngcacacnctcgaaatgcgnaangaccnccggctgngntcgtggacctgnncngctnccttttgagcaagttcaagcctggttaaagtccaagctngaattggcctccgctaggcctatatngaaattctatatagggccgctatgngccaatttcttttgctttttaccctgggggaaaggaaatacctcattagaagcccacccttctggtgtattttacccccnaattctttcaacaaaggaaaaaaaactggt

SEQ ID NO: 1643 - DNA, 472 bp, Homo sapiens
  misc_feature 357, 364, 375: n = A,T,C or G
gtctaaccataaaatcatcaatactgagaaattaaaaggggaacatgtcaggcctcactctttctgtattggctttcaagagtattgtccttgagggaaagccatctccttcttgacaccatggctacccttagacccctcgtgaagcccaagatcatctaagatggaccaagaagtttatccttcaccagtcagactgacatatcaaaattagatgtacgcatatagcagcaacccagaggcattgacaacagggtggggagaaaaatcaaaggcgagaccttgatccccaacattggttgtgggagcaaaaagaagcaaaacacatgctccccagtggctttcaaaaaattctgnttccccnatgtcaaaaanctggaagtgctgctgatgtgcaacaaatcttactggctgagattgctcaacatgcttctccaagaacgggtaaagccctgtggagagagtaacccgg

SEQ ID NO: 1644 - DNA, 465 bp, Homo sapiens
agtcgtccttgtctactccactaccaaatgttgaagttcttcaagaatcagtcctttggaggtgatgtcattgaaaatgatgagtaggaaactccaagagcgcatttctccacaaaaccagtgaatacattggcacaaattgtcagaatcaattttatataaattctggaaattagtcaaaggtttatagtaaccaaggaaacatctttttaaaaagatggctgaggctggatgctgtggcttatacctgtaatcccagcactttgagaggccaaggcgagcagagcatttgagtcaggagttagagaccagcaaaaaaaattagctgggtgtgtttgcgggcacctgtaatccctcagggaggctgaggcgggagaatcgcttgaacctggaagatggaggttgcagtgagccaagatcgtgccacctcactccagcctgggtgatagagtgagactctgtctc

SEQ ID NO: 1645 - DNA, 434 bp, Homo sapiens
  misc_feature 275, 375, 376, 377, 384, 386, 392, 395, 399, 404, 406, 409,410, 417: n = A,T,C or G
gggcattcagataagccatcatatcccctgtgacctgcacgtacacatccagatggccggtccctgccttaactgatgacatttcaccacaaaagaagtgaaaatggcctgttcctgccttaactgatgacatggtcttgtgaaattccttctcctggctcatcctggctcaaaagctcccctactgagcaccctgtgacccccactctgcccgccagagaacaacccccctttgactgtaattttcctttacctacccgaatcctataaaacgnccccacccctatctccctttgctgactctcttttcggactcagcccacctgcatccaggtgaaataaacagctttattgctcacacaaaaaaaaaaaggnnnggggggncnatttanttngganttaancnggnngaaattnttcaaaagggggggact

SEQ ID NO: 1646 - DNA, 435 bp, Homo sapiens
  misc_feature 373, 374, 376, 377, 379, 382, 384, 388, 391, 393, 396, 404,407, 408, 415: n = A,T,C or G
gggcattcagataagccatcatatcccctgtgacctgcacgtacacatccagatggccggttcctgccttaactgatgacatttcaccacaaaagaagtgaaaatggcctgttcctgccttaactgatgacatggtcttgtgaaattccttctcctggctcatcctggctcaaaagctcccctactgagcaccctgtgacccccactctgcccgccagagaacaacccccctttgactgtaattttcctttacctacccgaatcctataaaacggccccacccctatctccctttgctgactctcttttcggactcagcccacctgcatccaggtgaaataaacagctttattgctcacaaaaaaaaaaaggnncnngnggncnattnagntnggncttaaccnggnngaacttnttcaaaagggggggactccc

SEQ ID NO: 1647 - DNA, 81 bp, Homo sapiens
aatcaagatttcactggatttcccttgaggtgcacatttcctggatgatttccacttgtgaaatagaagaagattcgttgc

SEQ ID NO: 1648 - DNA, 198 bp, Homo sapiens
aactcccaggttctccaactacaacagatctccaaaacaaaacaagcaaaactcagaatctgatggaaagctgtttttaaaagacaaagatggtggggaaaatacaattaatatctactgacatctactacaccagccactgtgaggggaagtctacatgttatcttataaaaataaaaacaccccataaccaccatc

SEQ ID NO: 1649 - DNA, 367 bp, Homo sapiens
  misc_feature 15: n = A,T,C or G
cccaaaccataaggnccatctcaccttcactgcaacaaagaagggttgttaaagctggacacagatttgctcggcttcaccctctgatgtgttccacaccacttcacgccacttttcaaaaagatgataaaacgtcaggctgagtagaacagaactgggtgcaaataaatctctctgaagctaacttgcctctctctacccctacttccctctgcacgtgcctttgctttattcccctgcatgagagaagcagtcaaatctttcccattttcatacctggattgctgctcaacagcctcaacaactgagacctgaatgtatccccattttaaagaacctaacagaacattaaaattgtttcctgagc

SEQ ID NO: 1650 - DNA, 408 bp, Homo sapiens
cttttaagtttcgggtgaccatttttgccccaaggcttaacaaaaccctggaaaattgttacaaaagctgccaagctcaaagaggctgaaagcccccattgagtgccgaagagtcaataatatctgactcaaagtcacgatgattcttccgatacacaaacaaggccacaactacagagatcgccaggcaaacgatcactgctatcacaatcccaacatagagagcaacatcatctgaatcaggagcggctagagaggagagtgaaacattgaaccagctgcttatagaaatttcccacagtacacatatgtattgctataattttttcagacatttactgccttttttataggttaatttcaaatctatttcaaaagctatataaaatggctgtggcctttcagtgg

SEQ ID NO: 1651 - DNA, 364 bp, Homo sapiens
attccctagagacaaagccagtttgcctgacctctcaaccaaagaaccctgacaacttactccttagctagtatctccgtatatataaagatgtcaacttcatcatcagttcccagaaaccctctccaactgagtactgtattgtatgtaatatgaacaaaaactatgaaaggaaagaaaattgaggcccagagaatgcaaaaaatgattaaattcagaggcaaataactgagaagtagcaaggccaagaacaggcatctaggttacacatctctatcttcgagtgcatttttctaaaacaaagggcttggacccacaaaccatcacctggaattgcatgtgtgactgaaagggaggaaactgc

SEQ ID NO: 1652 - DNA, 291 bp, Homo sapiens
actccaaataagaaaatgaaagagtacaattcaggagatgaaagaaaaggaaaatccaggaaattcaatcagatctacatgactcatgttgtgtcaactgcaaatttctgatttcaaacttaaaaaaaaagaaacttcaaggacccttcaaattatgttcaagtcatatgcctgatgagacaattgaatcacattactggactacattttttccccttgattcaatctcttgctgccacaaatatgtttgttcagtgtaaatggagtgataaagattgacctttctagttg

SEQ ID NO: 1653 - DNA, 454 bp, Homo sapiens
  misc_feature 23, 25, 27, 32: n = A,T,C or G
ttggggagctcctgcattaagtnananctgangaaaaagagaacagcgaggagaaaaggataatagaggaaaagagcagaaagaagccatttatatctgactgctgctgtgggagttacagaatctccctcttcaacttgggccctttgcagatggtgtctctacaaagcaaagtgaaatggacggttttccagctaatttgttttgtatggacagccaagctggacacttgcagaccacaaagtctgtgaatgagaacctgggagctgacatgagaagaattgagctggagccttttgccatcactgaataaataacttaccctcttgaatccttacctgtacgactggcataagacaccagcctgcctttcacacagcttgtgatctaataagataatgcttatgtacctgttttaatataaatagactgatattaaaatggcacgtaacac

SEQ ID NO: 1654 - DNA, 373 bp, Homo sapiens
tacaaccaactctgaagccaagggaccacctttgcacatgagagacagtcatcaggaagcccaactgatcaatatgaaatcagtcatccacggccgggcgcagtggctcatgcctgtaatcccagcactttgggaggctgaggcgggtggatcacctgaggtcaagagttccagaccagcctggccaacatggtgaaaccccgtctctactaaaaatataaaaactaactgggcacagtggcgcacactaataccagctacttgggaggctgaggcaggagaattgcttgaatatgggaggcagaggttacacagagccaagattgcgccattgtgcgatccagcctgggcaacaagagcgaaactccctttc

SEQ ID NO: 1655 - DNA, 391 bp, Homo sapiens
  misc_feature 16, 17, 20, 23, 28, 29, 31, 40, 46, 63, 93: n = A,T,C or G
tctggggagctcctgnnttnagntacanntntagggcatnactganagccatctatcccctgngacctgcacgtacacatccagatggccggntcctgccttaactgatgacatttcaccacaaaagaagtgaaaatggcctgttcctgccttaactgatgacatggtcttgtgaaattccttctcctggctcatcctggctcaaaagctcccctactgagcaccctgtgactcccactctgcccgccagagaacaacccccctttgactgtaattttcctttacctacccgaatcctataaaacggccccacccctatctccctttgctgactctcttttcggactcagcccacctgcatccaggtgaaataaacagctttattgctcac

SEQ ID NO: 1656 - DNA, 285 bp, Homo sapiens
gtgcttatcacacatgcagtcaatgaacacctcacaaatgcaaggttcacatgcagtcttcgatgaacacatcgatcgcatccagcagtatgtctgtattggaaaagtccttccatagcacccagtaatgaaaaggaatgtggcggggagcagtactggacagtaaaactaaaaacaccaggaagatcacagtgagatcagcagagccctagaatggcaaatccatgacaaagaaaatttctgatgaataaaaacgtgcctgggtccaggccagcaattggcttc

SEQ ID NO: 1657 - DNA, 180 bp, Homo sapiens
atgccgtttggagtagctactttgaggacaagagacaaaaagcctgaggagaaagtcaccatgaaggaaacagaaagactaaacagcatgcgtgatctttgattcagagtccccatctcaccctggactgccttcctttggaattcccttgtggaaaaaaaaattaaactcttatttggt

SEQ ID NO: 1658 - DNA, 235 bp, Homo sapiens
  misc_feature 11, 39, 40, 58, 82, 90, 111, 113, 128, 129, 145, 164, 188,198, 201, 215: n = A,T,C or G
gccctgcactngatggatcaagctggcaccacccagatnnataaactggctcatctgntcttgtggcctccatccaagtacngactgagngctagaagacagcttcgaccncntgtgatttaatctcnnacctgaccaatctgcnctctctattgcttggcccnctacccaccaaattattttcaaanaaacccactntcnaggttttcaagaanactgatttgagtaataataa

SEQ ID NO: 1659 - DNA, 588 bp, Homo sapiens
ggtccaaactttagggtccccaccttgttacttgcaatgaaacggacacagtggaagacagcttggagtaggaaaaggactgaagactgcagcagccaggtgaacttctattcgtccatcaagacccaacccaaagaaacccacttgaagccaggcgggagggctcacgcctgtaatcccagcactttgggaggccgaggctggcggatcacctgaggtcgggagttcaagaccagcctggccactatggtgaaactccgtttctactaaaaataaaaaaaatagccgggcatcatggtgggtgcctgtagtcccagctactcgagaggctgaggcaggataatcgtttgaacccgggaggcggaagttgcagtgagctgagattgcaccattgcactccagcctgggcgacaaagcgagactccgtctcaaacaacaacaacaacaaactacactctagtctgggcgacagagcaagaccctgtcttaaaaacaaacaaacaaacaaggaaaccccatttgtaactgccactaattggactatacttctggtgggccatcttcaagcttcgggcttgaataaaccct

SEQ ID NO: 1660 - DNA, 342 bp, Homo sapiens
agaggaacaaaatggacacagtagttctgtgcttctccttgcaaagtgagcaacaggaccaagatccgaagcaatatcagaggccactgcacccagcagcagagatgagaacaactgaagttccaaatagatctatggcaagctcaaagctaaggtcataaaatgttctatgaaagcaagaccatgggaagaactggcacatgtgtttgggaagaggaaaaggttattgagtgcctactatgtgtcaggcactgagctgaatgcttccacatattaatgttttatacttgagttttcattaacagctctaatctgtactattaataaaagataaagaaatcc

SEQ ID NO: 1661 - DNA, 350 bp, Homo sapiens
aaaatagttggagaaatctaaggttgaaaacaacatatgttctctatattaaaacgtcaagagctgtactgaggaagtttgtggagtgggtggtagtgatagagacatactcaggaaggctggacccatggaggctgcccaccttgttcattgatttctacttgattgattccttcttgattgatttccaggatctctgaaacgagaagccctcccctttatatgtttaatcagatattgcaaagtggacctgagaacgagcctgtcggaagcagattatgaaggggcctatgttttgaatatgctgaactgctttggtttgtgactggggaagattaaaggcctacaac

SEQ ID NO: 1662 - DNA, 348 bp, Homo sapiens
agtgtgggattttcagcaagaagcagctgctcagtcaggggctacatgccccagcaccccttgtatctaggtggtgccatataactactcccaccaatggaatggaaagtgatttgagcacctctaggctgagggaggtggaaagtgatgtgccttctccgtgctctcttcctccatctgccaaacagacacaggggactccaagaccctagggaatggaagagcaacccatggaaggggcctgggctgctgaatcactcagggcagggctccaccggtggagtgaccaccagtctgaaacacctatgttggactgagtgagaaataaactctactgtgttaagccat

SEQ ID NO: 1663 - DNA, 574 bp, Homo sapiens
  misc_feature 5, 7, 535, 537: n = A,T,C or G
gtggntntgtccttttggaccaattatctaacctgggcctggactccatctaccactgtcctgcctggttcactgcagctcacttcatcttcctgtgccttctctgaaagggcccctccaaaagtttcctggaaactctcaaacaactgagaaggtgcctcgacatctgatttgccccaaacctctatacattggacatcttctgaataaggctgtgttgtatgttgggacaagcaaagggatggaaatcaagaattctgggttttagtcctgactgtcactacatggctgtgttacttctgactctgtgaagcagaactcgggcctctagcgtctgctagtctagatctaaaggtgtttcctgagggacagtttggcctggcatgcaggtacctctgcagaccacaacagtgcaccgaaaacaccccctcccagcacgcacacaagtctggctcctcagccaaacatcaaacaccaacactgctgcccatgccagatgccaaagtgagataatgtgtgttatacccttaagtgngntacaaagagaaaagattaataaatgttagctatcctt

SEQ ID NO: 1664 - DNA, 240 bp, Homo sapiens
  misc_feature 194: n = A,T,C or G
catgtgagtactcagaagacagctgtctgcaactcagaaagaagtctcaccaaaaactgaagcctaccaggaccttgatcttggacttccctgccagctagaactgtgagaaaataaataagtacatatttgttgtttgcaccacccagcctataggattttgttatggcagccctagcagactaatacatgcngtgttttgatataaatttattaaagaaacttctttatttgcttacc

SEQ ID NO: 1665 - DNA, 454 bp, Homo sapiens
acctcaacatgttttatctgggagtcttcctctttcatgacattcacaggaggcctatggtgtgccaggccccgtggacagcactgtggacacagatgcgtaataacagttcctaccttccagatagagaggcaagaaagggctgtggaagcaaacccaaggtactaaggaagccgggaagagaacctactctagacttggaagttgaaggggtcaagaaacattcctagagaagatacctgagtcttgaaaactgagaaggaattagtaacccaacagaggtgggaactttctgaggacggagatggagaggaagatgctgccagctgagggaccaccattctgaaagctaggagaaagtgcgcgatggaaagtgggcctgagggaaaggctgtaagcacctcactattaatcacaattctccctataggaaaataaatgctgtttctacttc

SEQ ID NO: 1666 - DNA, 262 bp, Homo sapiens
  misc_feature 165: n = A,T,C or G
cccactggcttccttacacctcctcgaacacgccagatgttacctgacggctcttgccagaatattctctgcctggaacgcgcatcccccagatatccacgtggctaactccctgacctcttttgagtctctgctcaaatgttatctcttcactcacacacaccnttggcactctactcaaatttacaaccagccacctacccccagccaaaactctgctagaaaaaaacggtatttaccataaagtcattgccaagcttgt

SEQ ID NO: 1667 - DNA, 297 bp, Homo sapiens
atggtgtttcgctcttattgcccaggctggagtgcaatgacgtgatcttgactcaccacagcctctgcatccaggattcaagctattcccctgcctcagcctcccaaaatgctgggattataggcgtgagccgccacgcctggccagcattcccaatttttaaaaatgaatgattggcacaaatcttagaaagccattttctgtagatttgaaagcaatgctatttacattgttactactttcttgttaaatcttgcatgtctgcagtatgtgttgtaatagaaacctaagattatg

SEQ ID NO: 1668 - DNA, 113 bp, Homo sapiens
ctggactccgtcccatagatgagctgaagcaaaaggaccttcacacagaacttttatcatcagcctgaggaaaagtactcgaaggacaaggccattggttgggaacttacacc

SEQ ID NO: 1669 - DNA, 466 bp, Homo sapiens
  misc_feature 376, 377, 422, 428, 429, 434, 451: n = A,T,C or G
cagggcctaagctgactttgcaagagatctcgctaagcctttctgcagatgcttgcccaatctggctggccctgctggaggatatatgctgttaaggcaaggcaggcagaggcagctctggctcgtctccacgtgcactggctggctttccagaggggacaatgcaccccacagaccacagctgtcatttggccatctctaccttcaaccttaccaagcacctggcctcagcacagattttcagagaaaactttgaacaaagcaacccaacactgtatttgtagaattggaagagacttggagccttccgaatgtgacctgactgctcaaatggagaaatgagaagtgggtaagcttgagcgcaagcttacactgnnaggtgggtggttgaaacgaaaacctctggattcctattaccaggncaagtnntactnttcagtttatcatacanggctttaaggggagc

SEQ ID NO: 1670 - DNA, 354 bp, Homo sapiens
atggagtttctctctcgttgcccagactggagtgcaatggcacgatctcagctcactgcaacctctgcctcctgggttcaagtgattctccagcctcagcctcccgagtagctggaattacaggcgtcccccaccacaccagctaatttttgtatttttcgtagagacgggatttcgccatgttgtccagactggtcccaaacttctggcctcaggtggtccgcccccctcagcctcccaaactgctgggattgcaggtgtgaaccacagtgcccggcccattctttctttttcttagcatccctatattaagtctgttttcacgctgctaataaagacgtacccaagactgag

SEQ ID NO: 1671 - DNA, 181 bp, Homo sapiens
atcctcagtgtcatatgatggctgctgtagatcctgccaaagaagatagagtatcttcatcacaagccagttcctgaccttcccactagaggagctgaacaaatgtcatgacaatttaacagaatagagctacagaaagagctaacagaatagagctactcatcatcatcctctagcctcc

SEQ ID NO: 1672 - DNA, 240 bp, Homo sapiens
gaaagttgtgtttttgctcgtcgactcaaggcctcgaggactttccccacttttttctatggcacacagagttctgcacgtgaacttcttgctggttaactggattgcatcaaaatgatttctctgtgaggtactattgctaccaggatatcaattactatcctaatgtggacatttgctctgatatgcataacaattgaaaatagaaataagcctctcagggcaatcatttcaattcac

SEQ ID NO: 1673 - DNA, 173 bp, Homo sapiens
ccaccctcctcctaactttggacagagcttactccagaagacagtcttggagtagaacaccatggaccaagtacttgccgagcatgcccactgccctcgattgtacatgtgcaaatactttctttgcctattcagaaattagcagaaactgttgaataaagggataaaggagg

SEQ ID NO: 1674 - DNA, 317 bp, Homo sapiens
aatactgtggtatttcctcttaaatacaatcttccagggcaaggcatggtattccagataacacaccaacaatggatccattctatggcttcacaaagtcaatcttggagaaagaaccgccaaaagctggcacaagcagtagcacctttacagtgggcaggaaaacaaccagaagtcttggggctgcagagatccaggccggcgagaagtccagagcatcagacaggaagagtttcctgggggtaggaacagtgactggcacatgcgggataaaagttcatgaaagaagccgaatcgattaaaggaaataaaaaggc

SEQ ID NO: 1675 - DNA, 170 bp, Homo sapiens
ggacaacgtcttgctatgttgcctggactgaactcgaactacccagctcaagcaatcctcccaagtagctggaactacagggtcgcactgtgttttatctaagttttaagaatatatatttcaccccacaccctcttgccatgagactcaataaaaatatatatacaggc

SEQ ID NO: 1676 - DNA, 220 bp, Homo sapiens
gttatcaaagagtcttcagtttggtggaggacggatttgctctaaagctctttagaaggagaaagagaagcattctgcaggaaccctagaaatgaaacgcaaccagcaagctgccatttgtccagagaagctcacactccctgggaaatggaatattgggtctcaacctgaagagtagctggacagagacaggaattcacaaataaaagctttaaaagat

SEQ ID NO: 1677 - DNA, 360 bp, Homo sapiens
ggttttcagggccaccaccatccagaccttcggaaaccctgcactggaccaacacccatgtccccaggacacctgaccctaaactcgcccgtagggcctgttgatgcacgctaggagtttcctgatgatgcccagcatttccctacctccttccctcggtctaatctcagccccttctcatctccacagtgctagctgctctgttcccattttgtcccacggtccagcactgggcttttcgctgacccgctaccatgtgccatttatttatctggccagacgctgaggctcagaggttctgcttcctgatacgggacctggcacaccaaaggagcccaataaatgtctagggagcgaatg

SEQ ID NO: 1678 - DNA, 362 bp, Homo sapiens
acctccagccttcaaatttcaatcataacttcagctaaaagcagcggcgggacagacgctgaagggaagtgacacggagctaacgcacagcgcttccagagacactttctccgctttctcgcagctcctccgcacggcgtcctgtgggcggccaccacaccgcaatctattctgagtttgcaagtggaaattaaattccttgtagccgaaatgagcccccacttcaatcagcctgaagcctgtcctcccatcccccaccgccctcccgctgcagcatcttttgaatatgcaaatgggacaccttgctaaatggtcagcaggattgatcctgctgttttcatcaaggaaataaaattaaaacg

SEQ ID NO: 1679 - DNA, 438 bp, Homo sapiens
  misc_feature 220, 319, 334, 364, 368, 370, 395, 396, 403, 404, 407, 419: n = A,T,C or G
gtctgagcccagggagctacttctggagatgctgtggtctggggtggatcctgccttctcagcccctgcctgttgaagtcactgaagtctctgctgcatctccgggcttctgctgagcagggctggaaggtcttgcttgaggagctgaagcccaccagcaggtggcagacaaatccagagggtattcattggaggatgaagatttcctgcctctgctcangattctcacggtgtggctgctgcagggaagtcagatcacctacgtggaggcccaggggcctggctctggaaacaggaggcagaagctgccagtctctantcttgggcctggcanctggcataacattacttcccccctattccntcgntnaaagcagcacaagaaccccaccttnnttttcannagngaaaggggctanggaccccgcctttctattg

SEQ ID NO: 1680 - DNA, 462 bp, Homo sapiens
  misc_feature 408, 424, 438, 439, 447: n = A,T,C or G
attggaagaagttgttagcttcttttctcagaacggacatgtggatttggggcaaggaagaaaagcaaaagcaaaagcccaaacattctaacgcaggaatggcgttcgaagatctgcaactatactacttggaaatgatccccaggctaaagtgaccagggaagtgacccaaaaaacaaattcttcttgacttttaaggcaggtgcaactgtggacagctgaggtcccctttgaaattatcttgccatcgtaggatgggctaggatgactcaactctttaaatgcatgttaaagactggctactgtatttactacattctggcctcattttttttggttatgattttgaaactcagaatgaacaataccacgtgtgtgatgatttagtcgcaaaaaaaaaaggccagngaggccaattcagctnggacttaaccaggnngaacttgntcaaaagggggggac

SEQ ID NO: 1681 - DNA, 241 bp, Homo sapiens
gtcttttgcagctgccttgggcccttagcgcccacgtcccagacccggacctcttggctcagatcttggatgaacctagcaaccttgaggacagacaggtaatttcaacattttctcctgtggaaggcagaatccctcctccttctctcaaggatatccatatcctaatctctggaacctgttaccttacacgatgaaaagaactttgcagatgtaattaagtttatgacctcatctctac

SEQ ID NO: 1682 - DNA, 476 bp, Homo sapiens
  misc_feature 168: n = A,T,C or G
aaggaccagcgtgcaggaggccctcaataaatattaactgaatggatgattcaagaattattccagtcctaaacatcaaagatttccaggtgatgttcaagagaaactattcaaactaagaattgcctggaagagtggattctagaaggaagaatgggtgactaaganttactcacatatcagaaaaccagaaaattcagaagatcttagcgatggcaccaccacccattcaccagcttaatctagaaacctggacatcatcattgactcaccttgatgatgcaattaaccagcaagtcatgacctctctgctttcaaattttttcttgaaaccatccatatttctccattttcactgccactggcccatgccaaaccctcatgtctcctctagagcttcctacattttcttctagctagatttcctctaaaccactttacacagaaaagctaaaatgaatttctttaaaaaacct

SEQ ID NO: 1683 - DNA, 226 bp, Homo sapiens
acccttaccaccaccatgagaacaagctcaggctggcctgccagaacatggaaccaagcagaatcatcccaactgaggccatcctaggccagcccccagccaaccctcagttgacagcacatgcataagcaagccctgtgcacatcagctgaacttgtcacagatcagcaaaactgtccagtcaatttgcagacttccgagaaataataaatggttgttttaagcc

SEQ ID NO: 1684 - DNA, 90 bp, Homo sapiens
  misc_feature 12, 15, 22, 30, 32, 33, 37, 38, 51, 72: n = A,T,C or G
gtttatttgcangangggtttnagggaatnanngatnnagtctgctgaaantatcaccaccctctggattanaagggatgtttggatgaa

SEQ ID NO: 1685 - DNA, 261 bp, Homo sapiens
  misc_feature 138, 145, 153, 154, 159, 163, 164, 165, 175, 184, 185, 191,197, 199, 211, 219, 224, 225, 226, 227, 230, 234, 241: n = A,T,C or G
gtggggtctttcaccatcagatgagaacacattgagaatgtatcatctatgaaccaggaaatgggccctcaccagccaccaaatctgcagaagctttgatcttggacttcctagtctccagaattgtgagaaataccntttgggngtgtatannctggntaannncaagctgaangggcctcgnnggcctntatgantnctatatggccgntatggccnattcnnnnggngggnaccccgnaagaaatactcataagccac

SEQ ID NO: 1686 - DNA, 352 bp, Homo sapiens
gttcaaaatttctattacaaattattgcatcctcctgtgaagactgcagcctctcaggtgtcttccatacgactaaaatgaagaggaagcacaaggagaaatctggacacagagacagatgcacacaaggggaagacaatgtgaagacacgcagggagaacatcacgtgaagacagaggatgggaatgacgcttcaacaagccaaggaacactaaagatgactggcaaccaacagtagctaggagaaggcaaggaaggattcccccatgggttttagagggaacacagcctcgtcaacaccttgatttcacacttctggcctccaaaactgggagataataaatttctggtt

SEQ ID NO: 1687 - DNA, 465 bp, Homo sapiens
  misc_feature 351, 352, 356, 357, 360, 363, 373, 374, 375: n = A,T,C or G
aaacccaaaggccagaaggaaatggcaaaacagttttcatgtgctagaagactatcaacccagaattttatacccagagaatatatccttcatgaataaagaagccacagcattctcagatgaagaaaactatgagaatctgttggcagaccaccctaagagaatgactaagtgaagtcctctaagcagaaaggaaacaataaaagaaggaatcttggaatatcagaaaaggaaaacatggaagtcaaaatacagtggtaaactatgaaatgtcagcgttcagccagatggtatgatggagcagcagaagtcagaattcagtgaggggacactgaaggaacagataatggnnctgnnttngcntggaaggggnnntcaatttgtaatttcagggttaactgcagaagtgtcttcaggaaggctgcatctgcaagccaggaagagagaactcaccagaaaccaaat

SEQ ID NO: 1688 - DNA, 134 bp, Homo sapiens
gattctgacaagtccggagtacgtcccctcatcatcagggcaggaggtaacgtgctgaatttaatagcaaagcaaattttgctggagaagaaatgagatttctttgtcaaggaaccagccggaggaacttcagc

SEQ ID NO: 1689 - DNA, 421 bp, Homo sapiens
  misc_feature 21, 341, 368, 371, 376, 392, 399: n = A,T,C or G
agcctgaacttgatggatcangctggcaccacccagatcgattaattggctcatctgatctgggggcccccccgacccaggaactgactcagcgcaaggagacagctccgactctccatgatttcatccctgaccaatcagcactcctggctcactggctcccccacccaccaagttgtcctgaaacactgctcacccagtgcttggggagactgatttgagtaataataaaactctggtcttctggttctagatccttgaggaatcgccacactgtctgccacaatggttgaactaatttacactcccaccaacagtataaataaaaacaaaacaaaacnaaaaaaaaaaagggccgggggggcaanttnagttnggatttaacaagggtngaatttnttaaaaagggggggactaccca

SEQ ID NO: 1690 - DNA, 472 bp, Homo sapiens
  misc_feature 355, 366, 456: n = A,T,C or G
gcctgcaccgagatcgacgccatcagcgtggagaagaggcgcatcatgcagcaatgggccagcagcctggtgggcatgaagcaccgcgacgaggcgcacagggcggtgctggaggcgctcagcgtgtccctagagcgcttcccaagtcaaaatataaacaccgctcgttcccgcctttctaccacatggcattccgctgggatacttctacggggaagcttcctgcccggggcatcgagggcgttcgcgtccgtctgttatggcggtgctgctgtagataaccggatccgcgaatgctaacgctcaccaggatgctatatagccttttttatattgcctattaagccccgaatgntttgggtctancgggtattgctaagtaggattgtgacagtcacgcccccggcagcggtgtttcaaagtcccctgacagctcaacatgttgtcacacttcangactgtgccaatccac

SEQ ID NO: 1691 - DNA, 367 bp, Homo sapiens
  misc_feature 53, 96, 99, 102, 103, 109, 118, 124, 129, 140, 142, 151,152, 160, 185, 200, 205, 206, 207, 208, 224, 246, 347: n = A,T,C or G
tgaggggcattcagataagccatcatatcccctgtgacctgcacgtacacatncagatggccgggtcctgccttaactgatgacatttgaccacanaanaanngaaaanggcctgttnctgccntaacngatgacatggnanttgagaaannccttctgnctggctcatcctggctcaaaagctnccctactgagcaccntgggnnnnccactctgcccgccanagaacaacccccctttgactgnaatttttcctttacctaccccgaatcctataaaacggccccacccctatcttccctttgcttgactctcttttttggactcaagccccacctgcatccagngtgaaataaacaactttatt

SEQ ID NO: 1692 - DNA, 507 bp, Homo sapiens
  misc_feature 457, 481: n = A,T,C or G
gtcagctgaggagaggaaaggattcttagcttgagttcactccagttgcctaatgtcatgcccattgctcaagcccatgtggcctgtttgaaggagaactgcttatctgtgcagcaatctatccgagggcctttgggccattatgctgtgaatgtgacatctgcagccaagctctgcagtcagagtctatgtaacaatcatggaagagtattcgaaaaacacctgagtcctccttctatctgcatatgcctgaaagcagtggtaagaaatatgttctaaacaagagtttcagattcatcatttctgaaaataataaacagaagacaataacagacatgaagaatggatttgtgtgtcactgctattacggctggcatggaccgtcttgtcacgatcactcttcagatctcctaagagtgatgaataaggctcctactattaacttcaatttattaanttttctcattatggcttcttctgngattctgctaaaaaaaatttagccca

SEQ ID NO: 1693 - DNA, 176 bp, Homo sapiens
ggcccatcccttggttttagcctggaagaccagttttgactttgaaccggttggcctagaatttggtgctttgtactacaaactagattcccagctttgtccagccctcctggagttgactgctgcctgaagaatttctcaccatgtaaacacaactctcctaaagcaggcctttg

SEQ ID NO: 1694 - DNA, 304 bp, Homo sapiens
agacagggtctcactatgttgcccaggccagtcttaaaatcctgcctcaagcagtcctcctgccttggccttccaaaatgctcggattataggcaagagtgtcaggcatactatatgctaatccaacaggactgtggtcttataagaagaggaagactctctctccaccatgagaagacacaatgagaaggctgccatctgcaagccagaaggagagccctcgctgggaggtcagccatgctggcaccctgatctcagacttccggcctccagagttggaagaaaataaacgtctgttgtttat

SEQ ID NO: 1695 - DNA, 422 bp, Homo sapiens
  misc_feature 317, 389, 392, 397: n = A,T,C or G
gcaccaccttacgaactggacactccgtggtgacctgaacggaaaggtggctgcccctctgcagctcaggtcttggtagagaagatctaccataaacagtgtagctacaaaatgctgagaatcagagggtcccaccaaactgactttaatatccaatgaagggacagctgtgtcctggactctccacaaatgttgacgtcatgaagaacaagaaagactgaaaacctgttccagattgaaggaaattagagatgtgacaactgaatacaccttatgatctgggatgggatcctagacccaaggacattagtgggtcnatggcaaaatctgacagaaattcaaggactgcttctctcattaaataagcttttcaaggaaaaaagaatgtnctnaaagntggatgaagatgtcatttggccatt

SEQ ID NO: 1696 - DNA, 308 bp, Homo sapiens
gttcgacacaacccgaccagcattccttcctgataagagacccctgaccatggagtggctctgactagcctatggaggctgcacacagacagtcttcgcatccttggcttcaccctctgacatatagggcctactgtaatccatttaaaggttaagtctccaccccagcgcgaacatggatgcatgctgcacacaattagccaattatgcatgtctatgcttcctctttgtgaatattcatagctcctcctataacctgttgaatatgtacatttggccacgctgttcagcataaatccctgtcttcc

SEQ ID NO: 1697 - DNA, 361 bp, Homo sapiens
  misc_feature 280, 282, 284, 290, 295, 300, 302, 304, 306, 312, 313, 314,319, 323, 327, 337, 340, 344, 346, 347: n = A,T,C or G
actgagaataaaggcaactgctgggtgtgatagctcgtgcctgtagtttgggaggccaaagcaagcagatcacttgagccccggagttggagaccagcctggataacatcgcaaaatcttgtctctacaaaacagacaaaaatgaggatcgcttgagcccaggaggttgaggctgcagtgagccacgtttgagccactacactccagcctggataactgagcaagaccctgtctcaaaacaaaacaaaacaaaataaacaaacaaaaaaaaaaagggccngngnggccanttaanttggnantnanccaggnnnaattngttnaaangggggggacnccnaatntnnttttttttttattc

SEQ ID NO: 1698 - DNA, 333 bp, Homo sapiens
  misc_feature 132: n = A,T,C or G
gccaagaaaggtaaaggcctcttgggcctgtgatcaaagagtcaacacttaaggttttggcgatgctggtaatgatgaaataaggcaacactggggcaaacactgttatggccaatgacctatgcatccaangcagcttcttcagcttcaagttgggacagtcgagcaccaagaagaggatctacatcagcgtcttggtactggtggtgacaaagcagcaatctgcctgaggctctgcaagcctacaacattctttttaacatccccaagctggaaacacgtaaaatgtccataagccacagaaaaaataaataaagtatggcattttcttac

SEQ ID NO: 1699 - DNA, 128 bp, Homo sapiens
gcggtaaaacacagaccatgaggttgaggtgccactggcggcggaggaagcggcgacctgcactgggagagattcattacttcggttttacctccggaaaaagctggagtcaagttatgcttatttac

SEQ ID NO: 1700 - DNA, 475 bp, Homo sapiens
  misc_feature 355, 363, 382, 414, 419, 456: n = A,T,C or G
tccctctgagagaagccagttgccaagttgtgagctgctctatggagaggcccacgtggcgaagaactaatgtcttctgcaacagccaacaagggccttaggcctgccaacagccatatgactgagcttggaagtgaatcttctgagccggccaacagcccgtgatcaaagccatcaagctacaaatgatcttacaaatggaacctcaaatgagctcagctcacggcttctaccgaggacccctggatcaacccgctggtccctcaattaccctagaaaattcccctctggaggacaccaaactgcagggccccttcttcacccctaaccagcaggaagtagccagaacgactgncacacggntcccaacaacaattggggnggtctggttaaaagccagaattgaaaggaggngccanttggcttcctgggtcaagtaggggctcaaaaagctgngaaactcactcatttcctg

SEQ ID NO: 1701 - DNA, 356 bp, Homo sapiens
  misc_feature 19, 37: n = A,T,C or G
tgctgacttcccacatcanaagcagaatgatcttcancccaagacacaggcaaagagagcatctaactgcttaaaatgagagcaggaatggctgttggcttagatagatggcaccccagagtcctgaaagaacttgcagatgtgatcacaggaccatctgaaccggagaaaccggggggaatggagagacagcaaaagaccggagatgggtaaatgagttccagattttccaacacaacaggaaaggtgacttacgggtctgtgtgctggttacatttaatgttgagcttcagcaaaactccggaacagatgattgaaggggctttgtgccgtatttatttaaagaaaagtaatga

SEQ ID NO: 1702 - DNA, 344 bp, Homo sapiens
  misc_feature 297: n = A,T,C or G
gacctgatgattgatttagcatctttggcatccggccctgctctgcttggccatactgctgccttcaccctcagctgttgcaactcttttggccactttgtgtaactgccctgccaagccctgcttcctggctgttcaaagaaagaagtgtttcctacaggagatcacaacaaaaggatgaaatctggggtgcaggggaagggtagcttctgaagctggaaaataaagaagtaaggaagggagactgtggaatttaccagggagggaaactaatatttccttttcatattaagttgntactattctggctttttaccatgatcatatattatattcaaaataaa

SEQ ID NO: 1703 - DNA, 241 bp, Homo sapiens
agacaaggccctgctctcccatccaggctggaatgcagtggtggtgatcatagctcactgcagccatgaattcctgggctcaagtgatcatccttcctcatcctccagtgtagctgggactataggcacatgccagcatgcccagctaattgaagaaaaacattttcagatgaaattgttgtacatatatcttcaagtgtgttagaaatatacatcttgtgtattaaatttatttgctcag

SEQ ID NO: 1704 - DNA, 457 bp, Homo sapiens
  misc_feature 370, 381, 382, 407, 416, 426: n = A,T,C or G
aatcttgctactctccatcacaaggcaaagtctatcttcctttcttttgaatctgggaagacacttgtgactgcctcaatgaataggaagaatacagtggaagtgatgctgcgtggctgctaagaacaggctggaaaaggccatgcagcctctgttcgtctccctcttggaacacttgtctttggaaccctgagttgccaagtaggacatccagggctgccgtgctgtggggaagcccaaaactagcccacacagagagaccacatgaaaaaacactgacattgcatgaagagagggtgatgtgctccagctgcctaaggcttcatctcctgcctgttccagctccagaaaacctgaaggccacagcatnagaccccttgnnttaaaccattttacttgacctgttntgaactttngaccaatttnttatttttgaccaataaaaaataattttatt

SEQ ID NO: 1705 - DNA, 482 bp, Homo sapiens
  misc_feature 200, 352, 356, 366, 377, 380, 383, 388, 389, 396, 411, 415,416, 422: n = A,T,C or G
atggtgtcagaagtgggatctgaagtagaggttgtaacgatccccaggagtgctgagtgaacaagcaagttacctgcagaatccactgtgtcctttgatctgtcacagcagctggggttcctgactttccctcttgttgcccaggctggagtgcaatggcacaatctcggctcaccgcaacctccgcctcccgggttcangcaattctcctgcctcagcctcccgagtagctgggattacagacatgtgccaccatgcccagctaattttgtatttttagtagagacagggtttctccatgttgatcaggctggtctcgaactcctgacctcacatgatccatccgcctcancctnccaaagtggngggacacaaanccnctngaccnnggctatnttgctggaaatttantaanngctggnggaaccattccaatcttggaaagctgcaaagacaacatgttaatgatcaacacctggccc

SEQ ID NO: 1706 - DNA, 349 bp, Homo sapiens
  misc_feature 331: n = A,T,C or G
gtgggaaaactggggcatcagagaggccaagcggcttgcccaaggtcacacagcggatgttcgagtggaaatggaatgcaagcattcagactccagaacttgcactgtcttcagaaatggcctcaagttagtggtttgctcaggggtgaagagcaaagcaaagttcagggcctcatcccagggtgtgtcacttggcatgagggacgaggacccccatttcctctcagctgaggggaagagctctccacaatgtccccctgcacggtcctctggctaccctgacaacaagggccagctctccctactctccctggagtaaagctgggctcangaggtgctacccgtttcg

SEQ ID NO: 1707 - DNA, 350 bp, Homo sapiens
atctgtcccatgatgaatctgggttgtccctgtgtgagccccttgaaccaacagattgtggcagagtgacattgcaccagtctgagacctacaccttaaggatgcctggcagctcctgcttttgtgttcctcggagtcatgagccacgaagtcaagctaccctgctggagagaccagctgaagaagcctcttgaagaggacctgagacttaaggctcagccatcccagactgtgagttaaacctccagatgagtccaaccccacctgctatctgactacagctacatagacgacaaaccacctaagtgattccagtcaacccacacaactgtaaaagataataaaagttg

SEQ ID NO: 1708 - DNA, 478 bp, Homo sapiens
  misc_feature 389, 397: n = A,T,C or G
aagacaaaagcaaatcagttttggcaagaaatgcactcagcggccctgactgggagagtgactggattgatacaaccatcagttctattcagattatggaaatccagcaaataatagatcatcagtattgcattcaaagcctccagtgcggatctggaaattataattacaatattcctgttaataaacacacacccaccaatgtcaagttctctctggaaataaacacaacagagccattgatagtcttccagtgcaaattcacccttggaaatatatgtttccatagtaaaaggggaaccaaagggatggaaagccacagagaaatctcccaggagatgacacagggatatcaagcacatttggagcctcctggaccccattttttnaacagatngttccatttccgggaagctgcccggatttagctgctgtcaactgatccttattttgctgggatattcttcaccgattactt

SEQ ID NO: 1709 - DNA, 472 bp, Homo sapiens
  misc_feature 318, 340, 343, 346, 352, 357, 376, 379, 387, 391, 392, 407,430, 432, 434, 435, 437, 439, 442, 452, 459: n = A,T,C or G
agatgtggtctcactatgttgtctagactggcctcaaactgctgggctcctgcgatccacctaccttggccttccaaagtgctgggattacaggcgtgagccaccatgcccagccgcttcatctttctttactcatggtggccccattattgctgtgaagcctttttctaatgttcattctctccctctgcaaagtgggcaacagtgaagaaactacatgattttcagggaatataagcatggaagatggactaaagaacacagcaggccgggtgcagtggctcacacctacgatcccagcactttggaaggccaagntaggaggatcgcttgaggctangantcnaaaccngcctnggtcaacataaaaaagaanccngcttttcnaaannaaaaaattttaaaanttaggcccaatttggggggcatncntnntngnggntcccagctgnatggcgngagggatcacttg

SEQ ID NO: 1710 - DNA, 147 bp, Homo sapiens
gcggggacatggaggcccacggagtacctggcaggcccacagtccacaggttggaaagaggtgcccaagccctgggctttaagcctgggctctgaccttcaacgtttgcttttcacaccacacatcatgtcaataaatagttactgg

SEQ ID NO: 1711 - DNA, 338 bp, Homo sapiens
tcaacttgctgaaagggacaacattctggaccacgcatgtaaccttggccaccatgctgactctcctggatgggctgccatcagggatcataggtctcatgagcagactgtcaccggatgacggactgaaccccaacaggtgttcttgctgcatctatgcaccgccagaacccccacacctcccattcttcaaatggacgtacagctttctccttaagtcaataaacttgaaaaagttgctttataccgcttgagtaagtggtcagcctcataaggaggagacaactgtgaagataaatatcatgaaaacaaaacgagattaaattataactagacat

SEQ ID NO: 1712 - DNA, 363 bp, Homo sapiens
  misc_feature 8, 23, 25, 28, 31, 45, 49, 61, 63, 95, 113, 141, 159, 242,335: n = A,T,C or G
gggcattnacataagccatcatntnccntgngacctgcacgtacncatncagatggccggntnctgccttaactgatgacatttcaccacaaaanaagtgaaaatggcctgtncctgccttaactgatgacatggacttgngaaattccttctcctggntcatcctggctcaaaagctcccctactgaacaccctgtgacccccactctgcccgccagaagaacaacccccctttgactgtnattttcctttacctacccgaatcctataaaacggccccacccctatctccctttgctgactctcttttcggactcaacccacctgcatccagntgaaataaacagctttattgctcacacc

SEQ ID NO: 1713 - DNA, 236 bp, Homo sapiens
  misc_feature 180: n = A,T,C or G
atctagaagcaataaaatgggcttaaggaacacggaataaagggagcaaccctgtgaagaccacaaaggcagaacagtgacagcagctcagcagcaagactgctgggcaccgggcctggctctccaccacctgactgggtaacttttcaaacaccttcatttcccaagaagtaggaatgntgggaagactaaataaacatatgtcaagtacttaattacctgcccacatagtaaag

SEQ ID NO: 1714 - DNA, 377 bp, Homo sapiens
gtactcacaagctacaatgtaaatcagtaaagaaagagataactataccagaatatggagcctattgataggactcacaagattcaaggtgccttgtccaaacagatgttcattgctctttgacacaccttaaataagagttctgtagttaaacaactttggaaaaagaggtgtactctcaccctcccccatcataatgaacatcagcatgaaggctctaagaagacccacagcaaagaagccggttcagttatttttaatctgactcttcacaaacttattttacaccaggtaactttcaaatcttcacagaactaatgttttgtgaaatttactttgaaaaacatcgtgctagaaataacattattttgctatcc

SEQ ID NO: 1715 - DNA, 356 bp, Homo sapiens
gggcattcagataaagccatcatatcacctgtgacctgcacgtacacatccagatggccggttcctgccttaactgatgacatttcaccacaaaagaagtgaaaatggcctgttcctgccttaactgatgacatggtcttgtgaaattccttctcctggctcatcctggctcaaaagctcccctactgagcaccctgtgacccccactctgcccgccagagaacaacccccctttgactgtaattttcctttacctacccgaatcctataaaacggccccacccctatctccctttgctgactctcttttcggactcagcccacctgcatccaggtgaaataaacagctttatttg

SEQ ID NO: 1716 - DNA, 436 bp, Homo sapiens
  misc_feature 389, 394, 397, 415, 420: n = A,T,C or G
gggcattcagataaagccatcatatcccctgtgacctgcacgtacacatccagatggccggttcctgccttaactgatgacatttcaccacaaaagaagtgaaaatggcctgttcctgccttaactgatgacatggtcttgtgaaattccttctcctggctcatcctggctcaaaagctcccctactgagcaccctgtgacccccactctgcccgccagagaacaacccccctttgactgtaattttcctttacctacccgaatcctataaaacggccccacccctatctccctttgctgactctcttttcggactcagcccacctgcatccaggtgaaataaacagctttattgcttcacacaaaaaaaaaaaggccagggaggccanttcanctnggacttaaccaggctgancttgntcaaaagggggggacc

SEQ ID NO: 1717 - DNA, 441 bp, Homo sapiens
  misc_feature 336: n = A,T,C or G
acctgcctttcatcttcagccatgactgtgaggcctccccagtcatgtggaactacggactcttgctctatcaccaggctggagcacagtgacgcaatctcggctcactgcaacttccgcctcctgggttcaagcaattctcctgcctcagcctcctgagtagctgggattacagagtcataagaagaaacggtgatgcctgacaacttggtaaaacctgagacatgaacattgagtcctggactcggattgtctggctctcaggacaggatactccagaattcactctgaggcctccactgggcagtcattggtctgctaagaacatcacaccgngggataaacttcctggaagtcataatttaaacatttgagttttccttttaccccagcaagggcctttatgttggctcacaaagcaatgtaatgacaatcttgctt

SEQ ID NO: 1718 - DNA, 443 bp, Homo sapiens
  misc_feature 206, 305, 310, 313, 324, 330, 355, 368, 377, 401: n = A,T,C or G
gtgaagttctgaggccaagaaagggtagctgatttctccactggtgacagaatttcgctcttgttgcccaggctggagtgcaatgacgagatcttggctcactgcaacctccacctcccaggtttaagtgattctcctgcctcagcctcccaagtagctgggattacaggtggagtcttgctctgtcacccaggctggagtgcagnggagcgtgatcttggctcactgcaagctccgcctcctggttcacgccattctcctgcctcagcctgcggagtagctggaactacaggaagaaaaatggncttanaangggaaaaccanttgcanccaagatccaaattaataccaaggnagccggggagaanaaagaaccntggtggaagaagagtgaaaaagcnttgtcttttgggggtgaattgcagaaagaaaataaattattg

SEQ ID NO: 1719 - DNA, 436 bp, Homo sapiens
  misc_feature 141, 146, 152, 351, 359, 367, 380, 389, 397, 413, 415, 419: n = A,T,C or G
gggcattcagataagccatcatatcccctgtgacctgcacgtacacatccagatggccggttcctgccttaactgatgacatttcaccacaaaagaagtgaaaatggcctgttcctgccttaactgatgacatggtcttgngaaantccttntcctggctcatcctggctcaaaagctcccctactgagcaccctgtgacccccactctgcccgccagagaacaacccccctttgactgtaattttcctttacctacccgaatcctataaaacggccccacccctatctccctttgctgactctcttttcggactcagcccacctgcatccaggtgaaataaacagtttantggctacncattaaanaaaaaaaggcccnggggggccnttccggtnggaattaacccgggtnantttngttaaaagggggggcca

SEQ ID NO: 1720 - DNA, 457 bp, Homo sapiens
  misc_feature 334, 358: n = A,T,C or G
ctatgaagagcagcccgctgtgggagacactgatggccctcgctgactctagagtggagtgaattgctaccttgctgaccaggaaatgatcgatgcctggcacctggcagtgaatggggcgtcctgcgatgatccgaacacgcctgttctcagaaatttgcagcacaatgttgttatccaagacatacaatgaattgtccataggatttactgcaaggtctgttggccactctaatcgcacctgtgaaacgaacagaacacataccattaggttaccatgtctttccatggacagttttaacttgaaaaaaagaaaaaaaaattggtgtattgnttcccccgtcttatgaattttaancaccattgggtgatgtctcggaaagtggagggcagggggaggatggttaatcacatgttctggtaaacgtacttatcatttatgccatttacaatataa

SEQ ID NO: 1721 - DNA, 105 bp, Homo sapiens
  misc_feature 14, 20, 21, 40, 60, 66, 69, 72, 79: n = A,T,C or G
cagaactgaggacncagtgnncatgtaactaactcctggntaagaggatatgggtagaangcacanggngcnacttccnggcttctgctccttgaaacacagtaa

SEQ ID NO: 1722 - DNA, 427 bp, Homo sapiens
  misc_feature 396: n = A,T,C or G
gggcattcagataagccatcatatcccctgtgacctgcacgtacacatccagatggccggttcctgccttaactgatgacatttcaccacaaaagaagtgaaaatggcctgttcctgccttaactgatgacatggtcttgtgaaattccttctcctggctcatcctggctcaaaagctcccctactgagcaccctgtgacccccactctgcccgccagagaacaacccccctttgactgtaattttcctttacctacccgaatcctataaaacggccccacccctatctccctttgctgactctcttttcggactcagcccacctgcatccaggtgaaataaacagcttttattggctcacacaaaaaaaaaaggccagcgaggccaattcagctnggacttaaccaggctgaacttgctcaaaagg

SEQ ID NO: 1723 - DNA, 315 bp, Homo sapiens
gagacctgagccactaagtaagaagtccagttaccctgttggataaaccacatggagaaggaaaggccctgagatacttggagagagggaaaagtccagctgcccagcacctgagctgagcccagcctcagccaaccccaccggctgactgcaaacacatcagtgaccaccagtaagaccagcagagctgcacagccaagcccagcctagattgcagaattgtgagcaaataaaatggatattgctttaagccacaaaatattgaaatgttttttaaatgtagaatgtgatttctaagaataaaaagttgcaaat

SEQ ID NO: 1724 - DNA, 415 bp, Homo sapiens
  misc_feature 308, 350, 360, 362, 365, 371, 383, 385: n = A,T,C or G
aaccaaaccaacaccggagaagctgagcaaatgcagtcagttggatgtgaattaccttttagttgctgacaacagaaagttaccctgaaccactgaccaagggatgaaaagcgtccgtgtactattagtaattctcagaatcatctctgtccccaaccaagtatggaaagccaagtacagtatcatggaaccaaattcaaatgctggtctcaaagttcccgacttgcttgccttcaagtgccacttgagagattttaaatgacagtgaaatgctttgttcaactaaaaattcaaagtgtcgggacaangtttatttctgagactcaagagatagtttttgctttagttgntgccattggngntgntggggngggggaaaaaangncagaaaataaaatctgccacttttcttttc

SEQ ID NO: 1725 - DNA, 350 bp, Homo sapiens
  misc_feature 291, 303, 305, 324, 328, 330: n = A,T,C or G
aattgtgacaggctcccaggacctaaacccagaaggaagcaggaccatattgctgcctagagaaggggatggagcagattccaggacaccgatgaaacagaagcttccatcacagtgctttctgctaccttatgagacagttcgcatctcaacagctctaggatacaaaggaagcacatacatttatactttataaggtggccaaggaatcctactgtgaacaaagaatttctaagataataaaatcccactttttttttctataaaaagcaaaaaaaaaaaggccagcgnggccaattcagntnggacttaaccaggctgaanttgntnaaaagggggggactacccaa

SEQ ID NO: 1726 - DNA, 91 bp, Homo sapiens
tgacacgaaaatctggttctcttgcactaatatgtgaacttatggacatgaatatttatgagctaatacgagggagaagatacccattatc

SEQ ID NO: 1727 - DNA, 285 bp, Homo sapiens
ataaggaaagcgaagcacagagaagtatctgcccaaggtcacaaaccagtggagcaggatttgacccaaagcagacagtcggacttcacagcccgtgctctcaacatccaactgctgaagagttaacaatttacccttgacagccgctataagcaaaggtaaatgctcaactgctaggaagggacagtcagaacaccgtcccatatccagtatccatgtctctctgtttgtttatggcctctatgactttggcaaaagaagtacacacaatctgattttccgaac

SEQ ID NO: 1728 - DNA, 71 bp, Homo sapiens
atggtggaggattgctcaagcccaggaatttgagaccagcctaggcaacatagcaagacctcatctctacg

SEQ ID NO: 1729 - DNA, 155 bp, Homo sapiens
  misc_feature 1, 13, 35, 40, 102: n = A,T,C or G
ntataatggctanagctggaaacacatcatgtatncaganggaaaagggcaagaagattgcaggatccacagacctggtattcccaaacagctgaaccagtntcagtacacctctggatttcccattacttgagataaataaactctttcttttt

SEQ ID NO: 1730 - DNA, 428 bp, Homo sapiens
  misc_feature 367, 370: n = A,T,C or G
gtatcgatcgcaagagtgcccccaatcaactttctgcaagcaaatctctgtttcatggagaacctggcctgcaacatgacacctctcaccacatcttacgtcagcagttcctaaatgtgtgctgtggacttgctacagcagatatgtttggagaaaaaaattcatatttctcatgttcaccccacacctacaaaaccataatctccatgaatgggtcccaaggatgtgtattttttcaaagctcctcctccactgctgaatctagtgtatagcttgatgtagaaaccactgctataccaaaggctcagcctcaaatcagcctacagcttctatcttgctccatcttcgtttcagccaccaatagagnggngaagccattaaaaaggtcaaaagtaggtaaataaaatgtgaaccagtatataaaagtt

SEQ ID NO: 1731 - DNA, 355 bp, Homo sapiens
  misc_feature 11, 26, 109: n = A,T,C or G
gggcattcagnataagccatcatatnccctgtgacctgcacgtacacatccagatggccggttcctgccttaactgatgacatttcaccacaaaagaagtgaaaatggnctgttcctgccttaactgatgacatggtcttgtgaaattccttctcctggctcatcctggctcaaaagctcccctactgagcaccctgtgacccccactctgcccgccagagaacaacccccctttgactgtaattttcctttacctacccgaatcctataaaacggccccacccctatctccctttgctgactctcttttcggactcagcccacctgcatccaggtgaaataaacagctttattg

SEQ ID NO: 1732 - DNA, 381 bp, Homo sapiens
  misc_feature 358: n = A,T,C or G
gtaacaacttttaaacattcacgtgacggaccaccttccctcagccaaacaacttccctgaaaggcgcccgaaggagccttcccatccaccgcgggtgcccaggaaaggcctgtggggctctcctccccgcgctccacacgccctcgcatcccaccgaggcgccagcttctgcctgcacgttgctgaaactggcctggaggttctgacaagaattagagcggcggccgttgccccggggatgacctggaagcgaaagagaccggcacgaattctagagtttcggggtttccgcgggttgagattgtacgggaaacaatgcattaaccaaacctaaaaatcaaacaaacaccgtctggnagaaccttaccattaaaaagctt

SEQ ID NO: 1733 - DNA, 449 bp, Homo sapiens
  misc_feature 5, 424: n = A,T,C or G
ctcangatccatccatcctgcctgtgctccctggttcgttttccctccagccactgccaaatgccaggacacaagtcaccacctcccctatgcttagccttgtcatcctccatgtcattgaggccttcacgactcccactctggaaccaagcaatcaaggcctctgaattgcactgttgcactgaccgttcacctccttactgtctgccttatgcagagtgcaagctctgtgaaggcagatgcctcgcctgagtggtttccagctgcccccagagcacctagaagaggcccagcaaatagaaggcactccatgattatttgataaaagaatgaatataacccaacactttatggctccccataactggatgcccccctccccatggtcagatcctttttatatttggtggacatgacagaaatnaatcttccaaataaatgaattctta

SEQ ID NO: 1734 - DNA, 366 bp, Homo sapiens
  misc_feature 316, 322, 324, 325, 330, 331, 334, 338, 342, 344, 346, 349: n = A,T,C or G
gctaacctaggatcagcacaatcagccagcagcaccatcatctcaggctgtagcagcaccaagcccttccagaaaagcccggactttccagaagcatcctcagcaagtgtcacaaggaaggaagccagaggctgcccatcgcatacctgaagagagtcaacctagtctccttaaacatttcttctgctccacccctgaaagaagcaatgattaaactttgaagccctgtatatcttaataccttgggaacatttgctatgtatatcctcattaaatgaaaacattgcaacggcaaaaaaaaaaagggccggggggnccattnannttggnnttnaccngggngnanttngttaaaaggggggggcc

SEQ ID NO: 1735 - DNA, 370 bp, Homo sapiens
cagccctaacagactaagacgaatactaactgagaacccaccagacttggagaaataaaccccttttgactgagccaactgaggctgctcttgaaatcaaaatctatcataaagtaagagtgaagctgcagcgtgggtctacctaaaactcaattcaagaaattcaagagaagagaacgctcagctagagtgaaccaggagactgcaacaatcttgttcatttggttattcacttatttaatgtctgtattttgtagatctagattaatgtgaatttccttagaacttgcatcttggttggtttactcagtgctatatccccaatgtctgacatagtacctggttctcaataaatactttgaaacaattg

SEQ ID NO: 1736 - DNA, 305 bp, Homo sapiens
gcctgaaacacaagcacaacacactgaagctaccatggatccccttggcccagcagctgttacaccctaaatgatattctcttctagcacttccttaccctgtggtcttaatctgaaggcatctggactcttcttcctattggtagaaggatcacaatatggtgcataaaacctattttatgtaacagcccagtggacctgaagcaacacttcatagccaagtacattcatagttcttcaacaaaatgtataaatttcaccccttgttgtaataaataaagacaataaataaatagcctcccatt

SEQ ID NO: 1737 - DNA, 448 bp, Homo sapiens
  misc_feature 409, 413: n = A,T,C or G
agctgctcttacatctaatgagaaaaaaggttctcactgcatccttggtgtctctcagatgtttcttcagatgttcagagcctgggagcagtaagtgttcaaaaaatggtgtttaagggtctcactccaacacccaggctggagtgcagtggtggtgtgattatggctcactactgccttgacttcccaggatcagatacgggctttcactgtgttacccaggctggtcttgactcctggacttaaaactatccaccagcctcagcctcccaaggtgctgggattacaggtgtgagctaccactagtggcctcttctaagaggaaatttggatatacagagagacaccagagatgtgggggcacagaggaaagacctgcttggatacagtaagaaaggcagcctctgcnaacntaagacaaagtcctaagaaaaacccaactgctcca

SEQ ID NO: 1738 - DNA, 511 bp, Homo sapiens
  misc_feature 19, 33, 35, 37, 44, 45, 48, 52, 54, 55, 57, 60, 79, 96, 129,179, 224, 249, 304, 338, 343, 350, 363, 372, 385, 419, 437,441, 455, 458, 459, 477, 481, 484, 494: n = A,T,C or G
ttttttattttcttatttnctttttattttttntntnggggatnntgnaacntnnanttnggactactgcttaagtcanaactgaggggcattcanataagccatcatatcccctgtgacctgcacgtncacatccagatggccggttcctgccttaactgatgacatttcaccacatnaagaagtgaaaatggcctgttcctgccttaactgatgacaatggncttgtgaaattccttctcctggctnatcctggctcaaaagctcccctacttgagcaccctgtgacccccactctgcccgncagaagaacaaccccccttttgactggaattttnccttntacctancccaaattcttanaaaacgggncccacccctaatnttccctttgcctggacttctcttttttgggactnaggcccaccttggcattncaanggtggaaataaaancanncttttttttggctctccnccanaancaaaaaatanaaataatatagctctga

SEQ ID NO: 1739 - DNA, 425 bp, Homo sapiens
ggtctcacttcatcacctagactggagtacagtagcacagttgcagcttcctacatcttgacttcctgggctccagtgatcctcccccttcagcctctcagcagagagagaaagaaagcagagctctttgaagcagagaaagaaagcagaaagcagagatctttgaaggcttaagaaaccataaggagttttggagagtcaatgcatgatgatctctgaagattctactgaaatctaatcaatatgtcctcactgccatcaattcaaaagaacttgctaagaaggctctagaggcttgtactctcagatagtgaaagtgagatgatgtgtagtgaaagtcatatataggttgtaaattgcaatatggaattcccaaatgctgaattcattttatctcttcggaaataaaaacctggtaaagactc

SEQ ID NO: 1740 - DNA, 208 bp, Homo sapiens
  misc_feature 23: n = A,T,C or G
gagaaatttggacacagacacangacatgggggaatgccatctacaagccaagaaacacctaagactgccagaagctgagagagagaactggaacagattctccctcatgggcctcaggaaggtcctccctcaggccctcttgccggcactttgaattcaaacctgtcgccttcagaactgggagacaataaatgtcttgtttaagcc

SEQ ID NO: 1741 - DNA, 256 bp, Homo sapiens
tttgagacaacctttcggggtctgctcatcctccatggcgagtcatcttgcaatgtgatctgttgcatcagacctccgtctgggatcatctttttcctgcctgaagttccagctttggaatctccctccggagggtctaccagtggcaaactcttaagtttttgtatttgtaagtgctatgatttcacctacgttctggatacatgtgcctcatactgggtacataattcttgaaatacattttcactgaatatat

SEQ ID NO: 1742 - DNA, 438 bp, Homo sapiens
  misc_feature 321: n = A,T,C or G
aacgctgagctgctcttctctttgaattccaaagagacatctaaaggaagccctcagctctgaagaccacctagctggaatctcagagggagagctggggacaggaaaggatgactactcccaccattctgtggacaccgagtccagcctccgggaggacgctgagggaaccttttgggacagccagggcagagaacgccttttacttcttaaggctctggatcaaaacagagaagcttctgtttcggagcctggcaatcctcgaacatcagtgtgcattttaagccataaagcgcaatactgattacaaacaggaatacnggagggcttcctttaaactgcttcagaaaacaaactcctcggggacttcgaaaggagctctcaccatagctcctgcaatccactctgaacaggaaaccttctcatctatttattaaa

SEQ ID NO: 1743 - DNA, 424 bp, Homo sapiens
atcacatgttctattttccaaagaatttgcaatccacaaaagaaacagcccaggaagcatgcggtggatgtgctaagtaactccacctccctggcgctgaggccagaaagcagacacttcctgcagctgcagttacacaacgatgttctgtggatttttcgggcaatagttaatgatttaagacaataaaatcctgtgccctcctgaatccgtgggcacttccctttgcaccacaaatgttggcctctgtctctactgcagccacggtggaaacagagagcaggaaaaagagcttggaagaggaaccctgaagaaggggtggacaccacgcatcccagacttctacacggctagaaacacccctgactaatattattactaaagtgtatacatggtggcaggccctgttctaggctctttacaa

SEQ ID NO: 1744 - DNA, 194 bp, Homo sapiens
gtaaagccattgaagcacattgagacaagagggaccccagagggaactcattcaccttctttccaacgggtgcgggtacagaagtctgcagcctgcacacggaagaggaccctcaccagagcctgaccttgctggcaccctgatcttggacttctggcctccagaacattgagtaatacatttttgttgtgtat

SEQ ID NO: 1745 - DNA, 300 bp, Homo sapiens
caattgcttgttcagagctcttggggatcaattggagggacactcacgaaatcatctcaagcacagacaggagacagtggactacatgataaagcagcgggaagattttgaaccctttgtagaagatgacattccttttgagaagcatgattcgtggtacagagaaaagcagcgtgagggagttacacatcgcatatcggtatggagagcactacgacggtgttcggaggatcaatgacaactcaagaggcacctgcacatctccagacggattttcagatgcttcatcaagatgaagtc

SEQ ID NO: 1746 - DNA, 471 bp, Homo sapiens
  misc_feature 405, 407, 410, 419: n = A,T,C or G
agtctcacggttgcccaggctggagtgtaatggcacgatcatcgctcactgtagcctcgacctccatgggctcaggagatcctcccacctcaccctcctgggtagttgggactagaggttgcatttcttttttctggaagcacatcttttaaaagatatttacatgaaggtctaccagacatgaaattggagttctagaaagggagaagatgaggatggggaagaaacaatatttcaagaagaaatctctcaagaatttgccaagtctgacccaaaacatcaagcagttgatttaagaagtgtataagcccaagctgggtaaatacaatgaaaaccacactttggcacaccagagtcaaactgagggaaatcaaaaccattattaaaccttggaaatcccctttncnttnaagcacctncattaagataaatagctaatttcctaaaacaaattatgggaagccagaacca

SEQ ID NO: 1747 - DNA, 614 bp, Homo sapiens
  misc_feature 20, 38, 45, 46, 71, 142, 154, 204, 237, 244, 252, 310, 389,419, 440, 476, 504, 507, 526, 540, 549, 560, 564, 570, 581,586: n = A,T,C or G
ttcttggggggaggcttacncttggcatttatagcttnaggcaannttggaggaggggaaggacccccttnccccaaagggggaaccaaggccggaaggaccccccaaaggttccgggattgcccacccttggccaaagganaggggtttttantttggggggtaacaacccgggggtaccccccggggccggaaatttcaaantctaaaattccgggaaggggaacttggccgccncccccanattggaanggggggggtttgtgggggcctcttttttattttgaagccttccgggggggaagccaanaaaaaccgccgccgaaaccaagaaacctaagaaaaccgaaacttggatttgctccccttagcaaatccgcattcattcnggtgcccaaggggaccaccgccatttcatncaagatgaaaccgtgggcccnaaggtttgacaaaggggtccacaaggcagggtttanatgggccccgtttaaaaacttatgcttnttnttgcggggggcccattctntaaggaatgggggnggggtcaanaatgaattccntttntttccnaattggggccnaaggnccgatggggcattcttttttaaaaaaaa

SEQ ID NO: 1748 - DNA, 546 bp, Homo sapiens
  misc_feature 513: n = A,T,C or G
ttacatccagagcattccagttgttaatgaagaacacagaggtgatttttcctatattggaaatttgatgacaaaagaattcataggtcgacaattgattctaattattaagtctttggataccagtgaagaaggaggaagaaaaaaactgctggctgttttacaggagattcttattttacccacaatcccaatatccctggtttcttttcttgttgaaagactactccacatcattatagatgataataagagaacacaaattgttacagaaattatctcagagattcgggcgcccattgttactgttggtgttaataacgatccagctgatgtaaggaagaaagaactcaagatggctgaaataaaagttaagcttatcgaagccaaagaagctttggaaaattgcattaccttacaggattttaatcgggcatcagaattaaaagaagaaataaaagcattagaagatgccagaataaaccttttgaaagagacagagcaacttggaantaaagaagtccacatagaagaagaatgatgctg

SEQ ID NO: 1749 - DNA, 474 bp, Homo sapiens
  misc_feature 366, 374, 386, 404, 429: n = A,T,C or G
agcaatatactgaaatccaagattgagaacagcaattctgagagcaaggcagtcatctgagtccaccgccttccagctggcccaccttatgaaagaagcaaaccctgagggcgtggaggagagaagaaactgctgtcagctttcccatcacacaacttctcaggcagtgctggcgctctcccctgctcacttaggacaaaccaacacttttggaatctgactgtcaaggagagtcacatggcaccgcgtttaacctcagatcccaagcctccaaatggggtgtggtttctccaaagggctcatgagactgatgtgtgaggacatgaggatgacatccggttggtgtggccactagaggaaatgccnttttaccnaggacaggaagnaggggggcccaattttcntttccaacatttcaaacaacaaggngtatgtccgacccccgattcaactttcacaaacctgcacttaatc

SEQ ID NO: 1750 - DNA, 496 bp, Homo sapiens
  misc_feature 12, 44, 360, 385, 397, 403, 442, 454, 461, 478: n = A,T,C or G
gtattacacganccccaaaccagaacgtctatgtggttcaggcntgccgcaatggaaaaaactttgacttctaattaaacacctgaaaccaatgaatcctcctcttggaaccaataagactgggacatcatcagaacctgaatgacaaacttttggaagccagggtctcacgctgtcacccaggttggaatgcagtggcgcgatctcagctcattgctacctctgccttctgggctcaagtgatcctcccaccacagcctgctgagtagctggactacagagttgcctgcatttcagcagtggatttaagcaacctctatgtaaaatattgcagcatgctgagcttaagatatttcttgnttcctgctttaatctaaagctttgnaccaatgatgantaactnggaaaaagaaggccttttccaagggacatcgctcactgncctgatgcccgngcagtgnacacttaccgactcagntttccaaagatcctcaat

SEQ ID NO: 1751 - DNA, 377 bp, Homo sapiens
  misc_feature 128, 268, 324: n = A,T,C or G
ttcgtgtttggttaaagagagacagtggacagtattggccaagcgtataccatgcaatgccttctccatgttcatgcatgtcttttaacccgggaacaagaagactgtccataggtctagacaatggnacaatctcagagtttatattgtcagaagattataacaagatgactcctgtgaaaaactatcaagcgcatcagagcagagtgacgatgatcctgtttgtcctggagctggagtgggtgctgagcacaggacaggacaagcnatttgcctggcactgctctgagagtgggcagcgcctgggaggttatcggaccagangctgtggcctcaggcctgcaatttgatgttgaaacccggcatgtgtttatcgg

SEQ ID NO: 1752 - DNA, 245 bp, Homo sapiens
ctccagcaacaactgtttcttgtgactttctgtgggactctgaggaatgttgggatgataatcacaggaaccaatggctgcctctggaaagcccataattctgcacattcatggagcttcactctgattccaaatccagaaagaccaccatgtcacttatggagacacttgaaatcctttccacatcttcactcatcacgcctggggtgagaactaggaatacgtgaataaaccaataacacgtt

SEQ ID NO: 1753 - DNA, 721 bp, Homo sapiens
  misc_feature 16, 17, 30, 36, 41, 45, 51, 54, 60, 65, 68, 72, 79, 81, 82,93, 122, 123, 128, 131, 147, 159, 160, 165, 175, 177, 181,190, 195, 197, 213, 255, 257, 278, 281, 294, 322, 332, 594,630, 699: n = A,T,C or G
agtcaagaaaacttgnnggggcccggaacncctatnttgtncagntgggcnctntccttntgggntanttanaaccctntnnggagacttttnatgctgggtggttggggacccattttaannggccnttngaggggtttttttttnttaaagggttannttttnaaaccgggcntnggtnggggttttnggccngntttttgaacaggtccncttaaaaaaccagaagggcttgccaaaaagaaatggcttttngnaatgggcattccggctttcgnatnccttgaaaaattnccggcaaaacacttacgacttaggaagntttgcttaanggccaaacacgaaagatgggcccaaagaaaccaaaactcgtaagggggactttccaaaaccccaagtacttctcttgcccaaacacttgtacctcaagtttcatttgcccaggaagaagccatatgaagcctcacaagtggccttgcactttaccccaagtaagcccttggaaagtggtgggggcccccgtacccttttgtacccaagccggggaagttaagccgccttgctcttaccttccttccttgggtttcacctatncccgcttcacttggcattgcccaagggggtttcttntttcttggaggggcaaaaagccccaaccaccaccctggtcttttttgggcccactttctttccaagccnaaaaattaagatttgggctctt

SEQ ID NO: 1754 - DNA, 345 bp, Homo sapiens
  misc_feature 43: n = A,T,C or G
accgtggccccatctattatttttgaagaggaaaactcctggngccaaaaagtccaccgatccttggttcagacaaggacttccaattgcttaatgtcagatgaatactgaaaggtcaccagaggatacaccacggaacacagggacaccatgactattgaagtgttgaagattccagatgaaacgttttttaaaatgtaagcctacactgcagggcatggtgttgtgcctggagtcccggctacgtgggaggctgaggtgggaggaccccttgagcccagaaattctagtgcaacctgagcaacacagtgaaacctcatttttaataaaatattttttaagcct

SEQ ID NO: 1755 - DNA, 308 bp, Homo sapiens
gatttcttttcaaaagtgaactttggtgtagcctctggtctggggcggaagatgagaatgagagggcagcctgacccccctcctgataaggaaggacccagcgcataacctgttcaggatctggagccgcacaaacacctgactcgccccttcaaaacaagatccgcggaatggctcgggacacaacaagaaattgccggcaacctgtgacggctcatttttaccgacagtgggaggcgggcagtcggaaggaatgcccatttctccggtgttccttcccagaagcaaaagaacgtgtttgtttatgc

SEQ ID NO: 1756 - DNA, 517 bp, Homo sapiens
  misc_feature 23, 26, 27, 31, 39, 488: n = A,T,C or G
ctgggagctcctgcgtgagctcntgnnttangttagaantgcggtgtgaccacaccaggccagggaagaaacacgtgcccagcctgccatctgccctcctgtcttggagccaggtctttccaccagcttccttcatcttttaacacttggtgaaaaggaatgacacgtcagtcaaagcccctggccggtgctcatggagcatctggcaggaggaagccccttcctggctggcctcccattcatcagtcagcgccgcaggctgggccagggacagctgtggaacctgagctgggaggcagctgtgaaaggcaagaaacaaggaaaggggacagaagtcacccggtcggtgagccagctcggaggcaggcagagaaagcaagagaaggggcctctcctgccgtcatcctaacctcccaggtcctccccaaaggctcccaacccttcccaaacactccccagtctccttcctgtccccaccaccatccctntggccctgatttacaagctgggcagtcac

SEQ ID NO: 1757 - DNA, 94 bp, Homo sapiens
ggcagccccatgaatatgaagatacttggaaagtctttactacagagcatgatttcaggaatgatgaaacaataaatgagaatctggtattaat

SEQ ID NO: 1758 - DNA, 342 bp, Homo sapiens
  misc_feature 14, 24, 38, 39, 48, 50, 168, 179, 180, 183, 191, 195, 199: n = A,T,C or G
ttaagtcgaactgnggagaggaanagaaagacagagtnntgttctgtngngcatgctggcgtacagtgccacaatcacagctcaccgcagcttccaacttctggactcacatgatccttctgcctcagacttccaagtacttgggactacagtcacgaatcaccacanccagcttggannganttttttangggnaaanaccagtcaattggaactggaattatatgacttggggccaaaataactgtggtcagctgacttgttaccgtatttaattttaattttggagcttgtattcaaaagctattatatgaatataagaataaatgatttttttaacat

SEQ ID NO: 1759 - DNA, 520 bp, Homo sapiens
  misc_feature 14, 18, 19, 26, 35, 37, 45, 52, 55, 58, 61, 62, 63, 68, 69,102, 106, 117, 367, 379: n = A,T,C or G
ttaagttagatgtntggnnaggaagngaaagacananacatgaanggagganggnccnagnnnggacnncaagatgccatctataagccaaagagaagcctnagangaagccaaccntgctgacaccttgttcttggacttctagctttcagaactgtgggaaaagaaatctgttgagtcatccagtctgcagtactttgttatagcagcccaagcaaatgaatataccttccttgactacttcatcttataacgtgcaaatacctcaacttcagcaccatttacatgtttattcactgcctttattggtagtcatttgtgtcttccccagaagactgaagctattaaaagactgataatctatttnatatcttttggnattatcaagctcaacatggtatcttcccacaataaaaatttgactttctgtactcttccttccattaatgcccgagtgaaaatatggctggtagtggtttgctgaagtaaagcggattctcctgcctgaaaaaaaaaagaa

SEQ ID NO: 1760 - DNA, 566 bp, Homo sapiens
  misc_feature 181: n = A,T,C or G
tgtacaactgtgatccaagtcaacgtcagccataaatccttcttcaaaaaattcactggatacctagaagaaaatgaaacacctttactgttacattatggtacctagcctccaagaagaccccgttgttccccactcttggtattcacacctttgtatagttccctgctcactataccanagcgggtctgcgtgaccataaagaagtgcggaagtgtcggcgcatcgtttctgagactagtttataaaaggctgcagctcccatctctctcagatcacttgctctgggggaaaccagccaccatgcagtgaggacattcaggcaagcaagcacccaggtgatgaggagctgcatccaccaactgtgagcgagccccgagctccgcagccctggccgacagcctgactgcagccccaggagacgctctgcgccagaatccaccagctgagctgctcccagaccctgactcgtaggaactgtgagatcatcaatgtttgttggttaaagctgctaagttttggggtcacttgtgacacagcaacagataatattcttccctaataga

SEQ ID NO: 1761 - DNA, 334 bp, Homo sapiens
ggccgacaagggagataaattccgtaatgggagctgcggccctgctctcctgtcctggtggagctttggctgatggaaaggattcagttgcctgtctgaacagtgactaccatgaactctacatgctgtctacttctaaccctctttggcctgactccagcttcaacacctggaaacatggcaaaaagaacagggggacattggcttggactggagccacgtgtcagagtttgactcaaggatagttgatgtagaatgaagagaatgagcagggaacaagaggtataaatgtgcatgatgtttattcattcaacaaacatcatttgagcccctg

SEQ ID NO: 1762 - DNA, 338 bp, Homo sapiens
  misc_feature 14, 17: n = A,T,C or G
tcctgtttgagttnatntgagggccaggaagggaaggacaaacctccctattaaagaaatccctggactggaaaggactggaacattgggagtggaagtccacattagcggaatagtatgttctgaaggcatttgagcagatgaaaacctgatacatgagacataaaacctgaggaaaattatttcatgggaacggtaaaaatggtggagagggtaaattgggcaagggagaagaacggaggagagggagagggaagtgctgctgaacttatttcaaagaagaagaagaaaaaaaatgatctcttgtttttcattaaataatggatgctctccaggcc

SEQ ID NO: 1763 - DNA, 432 bp, Homo sapiens
cctactcagttagaagatgacaaggatgaagacctttatgatgatccacttctactcaatgaatagagaaatcagcaaaggacggtgtgcaggccagctcccttctcaagccatgtggttggcagaccctgtgggagccttccgggacccacccttccatcctctgcacagccgctaaaggagggtgaggagcccacaccagaactggtctgcttgtgagatgcctgaagaggacagtcccagttgattgtgttttcttaactgtagactctaatctctccaggtggaatcttaattgaggctggccctgccagggcatgtacagggtcctgggaattcaacagaatgaattcaacagaatgcatgggatctgatgtcagaaatgccttgcttgtattctgaccatatcacatatgagctatgtggtgattt

SEQ ID NO: 1764 - DNA, 255 bp, Homo sapiens
gctggagtgcacaatcacagctctctgcaacctcgacctcctgggctcaagcgatcctaccacctcagtctcccaagtagctgggactacaagtgtacatcaccatgcctggctaattgattgtcaatttttgtagagatggggtatcaccatgctgcccaggctgccaagtctttatgtactttccgactcatcaaaagactaaattatgttcaatactattttagcattaattaaacatattttgctatattg

SEQ ID NO: 1765 - DNA, 428 bp, Homo sapiens
  misc_feature 25, 383, 395, 413: n = A,T,C or G
gacggactcttgctgtgtcacctangctggagtgcagtgggcgcaatctcagctcactgcaacctctgcctcccgggttcaagtgattctcctgcctcagcctcctgactagttgggactacaggcacatgccaccatgcccagctaagttttgtatttttagtagagatggcgtttcgccatattggacagactcctgaccttatgatctgccctcctcggcctcccaaagtgctgggattacaggcgtaagccactgtgcccggccatgcattcatttcttacacgtatcattgttgttttaaaagtgaaaagcctaagaagagatgttaggtttgcttgttagggtaggattaatttctaggtacaccaagccaaatttncagtcctgctgntaacacccaacttcttgngaacccttttttttt

SEQ ID NO: 1766 - DNA, 286 bp, Homo sapiens
gttggagtgtagttgcgtgatcacagctcactgcagcttcaatccccggctccagtgattctcccacctcagcccccgagtagctgggcctacaggtgcacattacaacacccagctagtttctgcagtttttgtggagagatcgtttcaccatgttgcccaggcatttctcaaactcctgtactcaagcaaaccttccactttggccccaagtactgggattcaggcaagagccaccgcgtctagccaattatacaatttttaaaataaattgaaatggtcgttg

SEQ ID NO: 1767 - DNA, 285 bp, Homo sapiens
gtcctgatatggaagaaactactgatgtcagctgaaggaccacactgatgcagctgtcctgaaggactccccgaggagctacctcatcaaaaaatacagtttccactttgcgatgattttatcccccttgccccaaccgaccagcaaccccagtattccagcccctcactctccacaatacccttaaaaaccctcatcccagaactccttgaggagatggatttgagggtcccttctgtctccttgcttggccacccctcaatcattaaactctttttctgctgc

SEQ ID NO: 1768 - DNA, 326 bp, Homo sapiens
gctgtggtaccagtggtatgaagaagcaactaagagaacccaatggatgagttcctctgtttcagtaaataatcaaaggcaacatctgagctggataatgaacaggaagaaaagaccaccaagtatcatcattagtggaatactgactgaaatgaatcaagatctcttcctcaaccaacatgacagaaacattccaaagctgccttcatcaacctaggttctataagaaattaaagtcctaatgctctaatatatgctattataggcaatgagctcttaatcctatgcatctagaagactggctatgtatcacccttgggagaact

SEQ ID NO: 1769 - DNA, 362 bp, Homo sapiens
tctccaaaatactaggtgtatggtgttatctttccaccactggtgaaaacaacccatggtctaggcactttggagtagcacccaccagctgtgtgaaggtcaaatggatcttaaagagttgtgcagtgggactgaaagaggagagtcactatttcagagataaccaaatgttaaaaaaaagagttttgaaaacgtggacaagcttcaaatgaaaagaagaggatgacagaggacttggaggggaagaaaacaaaaatcataatcatagacaatattgttcaccatgtacaagacagtgttctaagcagaatgagtgcctttggtgatgatacctcgtcaggaccacagtaaacttacccact

SEQ ID NO: 1770 - DNA, 105 bp, Homo sapiens
ggaggctgaggtgggaagattgcttgagcccaggagtttgagaccagcctgagtcaacacagcaagacactgtctcttaaaaaaaataaataaatacttgttttg

SEQ ID NO: 1771 - DNA, 548 bp, Homo sapiens
  misc_feature 294, 296, 297, 309, 312, 334, 351, 358, 362, 364, 370, 377,378, 380, 387, 389, 402, 409, 418, 430, 433, 439, 441, 442,453, 464, 465, 474, 483, 486, 489, 490, 504, 506, 508, 511,518, 519, 520, 524, 526, 532, 535: n = A,T,C or G
acagggtcttgctctattgcccaggctggagtgcagtggcacaatctcagctcattgcagcctcgacctcccaggctgagatgatcctcccgcctcagcctcctgagtagctgggactacaggcgcgcaccaccatgcctgctgattttttgtagagacagagtctcgccgtgctgcacagactagtctcgaactcctgaagctcaagtcatctgcccacctcagcctcccaaagtgctgggatttcaggtgtgagccaccatgcccagccatattcttttttttttttcaatngnngggaaattcccntancataaaattaactttttaaacngaacaattcaggggggntaaaaanattnanaagggnggactannanaaccttngnttagttccaaaanatttttnttacccccncaaaaagcccanacnttggangnnggaacttcccntttttcccctnntcccagccnttgaaaacnacnaanntggtttttggtggntngnctnttttggnnntttnanataaanggnggtttttaatatg

SEQ ID NO: 1772 - DNA, 358 bp, Homo sapiens
  misc_feature 25, 29: n = A,T,C or G
tggggagctcctgcttaagtccganctgngatatgttccgtttaaggctctgaagatggggagagaattctggatgatccaggtgggcccttaataatggtcccttattacagagagccagagggagatttgaaactgacaggagaagtcagtaagaccatgaatgcagagattcgagtaatacggctacgagccaaaagatgccagcagccacctgcagctggaagaggcataaatggattctcccctaaagctcccaggagtgtggccctgctgacaccctgatttcagccccatgatactgatgttggactggtcctcagaactgtgaaagaataaattcctattgttttaaacc

SEQ ID NO: 1773 - DNA, 183 bp, Homo sapiens
  misc_feature 4: n = A,T,C or G
aagngattggaggtgagtcagcttcaaccgtgccatgaggacctcaccctaggaggtggcagagacaccggaggaatggaacccaagtcatggaataacctcacattgcagagccaccttgctaatcttggactgctcacctctggactatcactggagaaataaatacacttttaagttgtt

SEQ ID NO: 1774 - DNA, 381 bp, Homo sapiens
  misc_feature 30, 31, 41, 55: n = A,T,C or G
ggggagctcctgcttaagttacgaagctgnnattcattctntagaagggcatcanaggaagataaagaaggatcctcaatgtcagacatctgagcccaagctaagccatcataatccctgtgacgtgcacatatacatgccccactccaactaatcaatcgaccttgtgacattcctcccctggacaatgagtctcatgatctcccaaccctgcaccttgtgacccctcccctgcccacaagagataaccacctttaagtgtaattttccactacctacccaaatcctataaagctgccccacccctatctccctttgctgactctttgtggactcagcccacttgcacccaagtgaaataaacagccttgttgctctcac

SEQ ID NO: 1775 - DNA, 459 bp, Homo sapiens
  misc_feature 18, 19, 33, 114, 146, 157, 171, 178, 187: n = A,T,C or G
gtcgaactgtgaccctgnnctcccttgctttantggaattctcttccagcttcttggaccctgtactggggtgaagagtatcttccaaaaattcacatctacccagaacatcanaatatgaactttttttgaaatacgtttttgcngatgtaatcanataaaaatgagatnataccanattagggtnggcccttatccaatgaatagtatccttacaaaaagacggaaacttggacatgcacattccgggggaacctccatgtgatggtgaacactaagactggagtgatgtgtctacaagccaagaaatgccaagatttccagcaggcaccagaagctagtagagaggcatggaacagattgtccctccgaacctccagaaggaaccaagcctgcagatgccttaatttcagacttctgatgttcagaactacaaaagaataaattcctgttgctttt

SEQ ID NO: 1776 - DNA, 281 bp, Homo sapiens
  misc_feature 29, 38, 44, 48, 49, 53, 65, 262: n = A,T,C or G
tggggagctcctgctttaagttagaactntgggacagnatgtcngtcnnacanttttatcccggntggaatgcagtggtgtgatcctcctgcctcagcctcctaagtagctgggactacagagacggggtttcaccatgttgaccaggctggtctagaactcctgacctcaagcaatccacccacctcggcctcccaaagtgctaggattacaggcgtgagccacctcgtctggccaataaacagaacttacaattgatctnaaaaaaaaaaaggccggcg

SEQ ID NO: 1777 - DNA, 252 bp, Homo sapiens
gaagatgaggatactgacagagtaaaatcatggagaaaatggaagaactgaatgcagacatgagaagttaaatcacagaagaaaagttaagcaggaacttgagagagggatgaactgtgacaagttgtaagaaggaagaccaggactcaccaggaaaataataaattgtccttgatcgtacaaaagaatgtgttaatggaattttcctaataaatgtgagagaatgtcagcataaatattgattttaaaaac

SEQ ID NO: 1778 - DNA, 380 bp, Homo sapiens
  misc_feature 304: n = A,T,C or G
atggagtcttgctctgttgcccaggctggagtgcagtggcacaatcttggctcactgcaagctccgcctcccaggttcatgtcattctcctgcctcagcctcccaagtagcggggactacaagcacccgccaccacgcccggctaatttttgtacttttagtagagacagggtttcactgcgttaaccagatggtctcgatctcctgaacttgtgattcgcccacctcagcctcccaaagtgctgggattacaggcgtgagccactgcatccggcccagtaatcttttaaaccacactcattgnctaattttgctagcaattcaatataaactttatgctttgaaaataaaattggattcattttgaagacttaaaaaag

SEQ ID NO: 1779 - DNA, 120 bp, Homo sapiens
gtcatctttgatctatcagattttaaggcatcatctgacagcagatcttcaataagtatctgtggcatgaaggaaaagggaaaggaaaagggaaaggaaaaaggaaaggaagaaaggaag

SEQ ID NO: 1780 - DNA, 317 bp, Homo sapiens
gttcatgtggaaccctgggttctcctacataccatttggagacgctggggaccagtattaaagaaaaattatccagacacttgtaaaaatgcacagtgatggacattgaggaagatattgtatatttgttcactcaacactcattccaacgctctcctagtttgcctttctatctactacaggctggaagactgactctagtggagcctgctgtctgaaactccgaagtctgaccaaagcagcaaccccctctccattatccctgttccccctcctctcacgacataaacaaaagtgtaagcatggaaatcataatt

SEQ ID NO: 1781 - DNA, 300 bp, Homo sapiens
atgtaaagagccatgaaacagatgtgagagatgccctgacttagaagccccctcttcacaggtgccaacatctcttgaacaactcagcaggcatggtttcaaagacccccccacacaaaatgcccgattatgagtcaacaccttccaggaagcccaaagcattttccttatctggagatcctctgtcagtcaaattccactattatgaatacagcaaaacaatacagaagaaatgagaccattatgtaacagaaatagatgtcacagagatcacacaataaagctcacgcaatttactcc

SEQ ID NO: 1782 - DNA, 436 bp, Homo sapiens
ctctgttgcccaggttggagtgcagtggtgcaatctcggctcactacaacttctgcctcccaggtccaagctattctcctgcctcagcttcctgagtagctgggattacacgcacacaccaccatgcttggccaatttttgtattttaaaagaggtggggttttatcacattggccaggctggtctcaaactcctgacctcaagtgatccacctgcctcgccctcccaaagtgctgggattacaggtgtgagccaccgggcctggccaagagttacttacatttttaaatgacacattatggcattttatgggagaaattcttctgctgtcggcaatattcgatttgaggatttgaccaggtctctggacatctccacacgtgtcaatgggctaaggtgctttaaataaacaaggttatctgcataagtccacaat

SEQ ID NO: 1783 - DNA, 388 bp, Homo sapiens
attggcgtgcttaaagggctgaccatctgatgtacaggaaatggaaactactctctgaaaagcaagtgatctcccagccgcacccatttaggagaccaggattttattttgatccacaggagactaaatgagttagaggccactcctgtatcaacagagtttgttacttaaatgacagtagggcggttcgcagaaggaacaccaaatagtctgactatctaccaagaagagagtgtttgaacacatgtgcaacctcttgactgtggtgtgtggggcagcatttaataagaaagagctaaatctgcttgatgtgggaatatattcaacacatgttaagtgctaaaatattcaaagtaaataaatgtctatgtactccatattgttaaag

SEQ ID NO: 1784 - DNA, 324 bp, Homo sapiens
cggctgaatcacttgagctcaggagttcaagaccggcctggccaacatggcgaaaacccatctctacaaaaaatacaaaaattagctgcacgtgatggtgcacacctatggtccccgctacttgggaggctgaagtggaaggattgcttgagcttgggaggcggaggttgcagtgagccaagatcatgccactgcacgccagcctgggtgacagaggcagaccctgtctctaaacaacaaaaaaccccactgaattgtatacgttaaaaggactttacatcacgtgaattacatctcaatgaaaaataaaatactgaatgaacg

SEQ ID NO: 1785 - DNA, 565 bp, Homo sapiens
  misc_feature 146, 158, 503, 515: n = A,T,C or G
gtggaaagagaatagcttgtgagagtgtatgagtggaatgaagtggtcagatgagagagcgcggcggagatggagagaagcggagaacttgatgcatattttggaggcaaaatcaacaagattggctgatggattaaaagcagaanattttgccatanagaaatctcttgcttttcaatctctccaatttgggaaccaaccaaccaaccagtctaccaaccagccaacgaaccaactactcaaccggtcaactgactcctcccggagacaaagattggagaattgcttgaatctggtacaaagactaaagcaaagtaatactgtatcatgcacagacctcaactctgtgaagacagtccctcatgctgtaggaagtcagccttgaatatctaggcttaggggaggctgagaaaggtcaccactggagaagtaagcggttggggcaggtcaggatccagggctctcaattcttatggagagattttgcttttttaaaacatcanacctgctggtgntgcactcagttttctttcttataaaaatcaactctttttgagatgtactg

SEQ ID NO: 1786 - DNA, 343 bp, Homo sapiens
  misc_feature 3, 9, 12, 14, 15, 16, 19, 24, 65, 161: n = A,T,C or G
canattgcngcncnnnggnaaaanaaacagccatgttgctcacacaaagcctgtttggtggtctnttcccacggacacgcgagacaatgaggagatacaaggtctcgctgttctacctaggctgttctagaactcctaatgtcaagctatcctcctgcctnggcctcccatgctgttgggattacagctataaattcatacaattatcagagtttggttttggtcaagtcataattgtgagtgaagaaccatggaaggagaacatttcttgctcatcaactactttcataaaatcaacaatttgcttaagtaaagtcttcaaaataaatactgattttaatga

SEQ ID NO: 1787 - DNA, 403 bp, Homo sapiens
  misc_feature 373, 376: n = A,T,C or G
ggttttgctctgtcacctgggctggagtgctttcgtgcagtctcagctcactgcagccttgtcctccccagctcaagcaattctcctgcctgagcttcccaaatggctgggactacagggcttatgtctgggatcctcacagagactagaagtgtctcccatccccatcgcagtccctggcacttcctggattgtcgagcggctccctgcctctgcccttttgtattcggagctacagccttgcctcccctgttcccaccaccctgaccacccctcaacaccatcccgctgtcagctccgccgccaactgaggcgacacctgttcatggaaaccctgtgagcctcttctgtatccatacacaataggtaatgntgntttacgtgtttcaaaacattaatggtg

SEQ ID NO: 1788 - DNA, 185 bp, Homo sapiens
  misc_feature 104: n = A,T,C or G
cccagccccacgtaaacaagcccagctgtcctgctagagaggttctggggtgaggctgcgaggagaagagccttgatttgaagccttaagagtgaccctgagcnagaaccacccagttaagctgtgtctccattcctgagccacagaaactatgagatgataaatgtttattgctctaagttgct

SEQ ID NO: 1789 - DNA, 231 bp, Homo sapiens
agacaaggtctcactctgacacccaggctggagtgcagtggtgtgttcatagctcactataacctcgacagtgagatcctgagctcgagtgatcgtctcccctcagcctcccaaagtgatggaattataggcgtgagctactgtacccggccactgttgctgttttgaaagggagccctcctctcccctaccacattctatattaagaaattccaaattaaatgaagagat

SEQ ID NO: 1790 - DNA, 153 bp, Homo sapiens
  misc_feature 58: n = A,T,C or G
gtgaggacacagcaatcctccagaggatgcagcaacaagacaccatcttggaagcagngcagccctcaccagacaccaaatcggccagcccattgatcttagacttcccagcctccagaactatgaaaaataaatttcttttgtttataaatc

SEQ ID NO: 1791 - DNA, 289 bp, Homo sapiens
ccacggaactgggattcctgaaaatcaaatacagaactcatcataccattggttgaattacaatgttctactttaattgggcacttacaaagtaattcttcaatcagtgtctctaatgtctcactgcttcccaacaaatctacgaagacagaacaaaagatgcaacttacagaaacacagaaaattaagactgtcagaggacatagtgcttgattcggaggtggttgggagagagattttcactgaatagcagaataatggaagattatgataaaaataattaatggtc

SEQ ID NO: 1792 - DNA, 275 bp, Homo sapiens
  misc_feature 24, 29, 31, 35, 36, 37, 38, 54, 102, 103, 122, 124, 147,169, 181, 191, 197, 206, 215, 217, 237, 242, 243: n = A,T,C or G
gcatgtgacaatgcaatgagaagntggcngnctgnnnntcacaagagggtcctnaccataacctgaccatgctggcaccttgattcccagcctctataactnnaagctgggcaactaccatntncagaagtgtaagaatcaaatttntgatgtgtataagccatgcagnctatgatacttnatgatagtanccaganctgactatnatacagggncntatacatattttatgcttcntagtnntcatctgtaaaataaaaagtttgaaaacaagg

SEQ ID NO: 1793 - DNA, 292 bp, Homo sapiens
gtctactctgtcgcccgggctggaatacagtggcaggatcacagctcaccgcagccttgacttcctgggccctaagatcaggtgatcctcccacctcagcctcacaagtagctgggactacagacacccaccaccacaccttgactaatttttttatctttattttttgtaaccggtctcaaactcctggcctcaagccatcctcccacctccacctcccaaagcgctgagattacaggcatgagccactgcgcccaatctagaccctaataatgaataaaacattaaaatt

SEQ ID NO: 1794 - DNA, 577 bp, Homo sapiens
  misc_feature 350, 415, 420, 483, 516, 534, 536, 554: n = A,T,C or G
acggagtcttgctcttattgtccaggctggagtgcaatggcgtgatctcggctcaccacaccctctgcctcctgggttcaagcaattcttctgcctcagcctcccaagtagctgagattacaggcatgcaccaccacacttggctaattttgtatttttaggagagatgggtttctccatgctggtcaggctggtcttgaactcctgacctcaggtgatccacccacctcggcctcccagagtgctgggattacaggtgtgagccaccacgccaggccttttttttaattttagtaagaaagaggtctccctatattgcccaggttggcctcaaactcctgggcttaaanaagtcctcctgcctcaacctctcacaatgctgggatcgcaggtatgaacaaccacacccaacccnggtangggtattattatcatcatcaacaatggtattctttggttctcttaaccaaactgaatgcccgnacctcttttcacaatggcttttcctttctggantggcctttggctttgttngnattcatgtttcacatcantaaaagcccctcttcaggatgcc

SEQ ID NO: 1795 - DNA, 148 bp, Homo sapiens
gtgaggacacagcaatcctccagaggatgcagcaacaagacaccatcttggaagcagagcagccctcaccagacaccaaatcggccagcccattgatcttagacttcccagcctccagaactatgaaaaataaatttcttttgtttac

SEQ ID NO: 1796 - DNA, 338 bp, Homo sapiens
gaagggaggcagcccgagcagacttactgaaggatgagctgatctttgttcaaatcctggctttaccacttaatagctgcacacttcctgcagttcctcccacttatctgagtctcagatgctccccgttaagatgggtccaatagctaccactgcatttacctcgaaggagtaaatgaggattaactaagcgcctgatgtgaagaactgtgcctgcagcctttgaaggaagccaggctttcgaggatgtgtgaggcctggggaattcatttgtttcaaataaccatcaatgagattccagatttcctgcccagagttaaaatcggtgttgaaaaccc

SEQ ID NO: 1797 - DNA, 334 bp, Homo sapiens
  misc_feature 27, 32, 38, 51, 59, 65, 72, 73, 91, 100, 114, 117, 136, 141,146, 147, 176, 179, 193, 267: n = A,T,C or G
tggggagctcctgcattaagtgagganctganattatntgtatgcacattncatccggntctcanatatcgnnacttgttcaccacagtanaggactcanaaatacccatggcnacncactggagatcctcactgnctcangggcnnagctggtttgaacacggtctttccattgnttnactgcccgccattnaccctcaaggtccattctgtgccaaggcattgcatgttctcaaggcaatgaccctggagaatgaatagccatgngtggcagtataagtgcttggaaggtgacttagcccatttgaacaataaaactgtcttttaaacaggt

SEQ ID NO: 1798 - DNA, 448 bp, Homo sapiens
  misc_feature 1, 39, 45, 47, 62, 63, 69, 81, 117, 139, 152, 158, 174, 203,206, 251, 264, 358, 384, 389: n = A,T,C or G
ntcagagcccggcgctgcatcagactcacgtcaactaanaaactncncctgtttatttaaannaaatcnagccccacccanttgaagtcactgatgtaactcagcaacccacttggntcccaatcctggaaggatacanacatgttcatgangcttcnggcgcatatgtgacanaactttccatgaaaccaactggccatgantcnaaggactccttcacagagacaaatccatctccttcaaatacccanattctattggtgngggaaaggcaacgatttgaaaaactggagcattttacctaaagggattttaaaaaatcccaccattgctttatcacaacttgggggattattantggatttccctccctcttgctcccanaaggnggactttggagaaaaagagagtttgggagctaagaataaaccgcatttcttgcatatgt

SEQ ID NO: 1799 - DNA, 216 bp, Homo sapiens
gagagacggggtttctccatgttgcctagcctggtctcgaacctctcacctcaagtgatccgcctgccttggcctctcaaagtgctgggattacaggcgtgagccaccgtgcctggccctagcaagtcacataatttatagagggtaactctgtcgattttaaacttcgcgtagtctgacccattcattcatccaataaacacgtattcagcacct

SEQ ID NO: 1800 - DNA, 260 bp, Homo sapiens
  misc_feature 141, 154, 155, 176, 178, 179, 182, 185, 194, 196, 203, 205,209, 214, 215, 221, 226, 227, 232, 233, 241, 245: n = A,T,C or G
catgtgagaacacagtgagaaggtggccatctacaagccaagaagagagccttcaccagaaatggaattggctggcatcttaagtttggacttcccagccttcaaagctgtgagaaaataaatgttgtttaagcccttggngaaaaagacaaannaaactgcttttcaaaaaactnannaanaanttggacggngncgggggncncctntgtgnnctttcnacacnncgggnntttttttnaaanggggggggccccccc

SEQ ID NO: 1801 - DNA, 520 bp, Homo sapiens
  misc_feature 234, 450, 500: n = A,T,C or G
gctcagctcatcatgaagaatgtccatgtgactttggttaataaaataatagatccagtggactgtagtctgtttaactgagacctcacacataatgtcatggttgacagttactggttgaaggaaatccatgttgggcttctgtggatgctggattctttccttctgagaagaaatataacacactgactttgaggtgatggtggagaaaaagtacaagcagaagacttttcncaacttctccataggctggagtgcagttgcatgaacatggctcacagcagcctcaacttcctgggctcaagcaatcctcctgcctcaccctccatagtaagctgggaccataggcaggtgtcaccacacccaggttctgtaactggagactgccaatgaaactgccaaaaggcagattaaccaggagaaaagacatacagacttcatctgatggtnacaggttaatttttacatgcatggaggccttcatagaaaaagaagtgaangccctaaagaagtgatttta

SEQ ID NO: 1802 - DNA, 393 bp, Homo sapiens
  misc_feature 1, 2, 7, 29: n = A,T,C or G
nnactgncgcactacagctcacgactgcngccagcatactgacaatgacgcagcccggacctgggctgtctctacccacaggaccctcttgtggcccctcctggacacacccatgttcctcccagatcacccctcgtggaccccccacaaccactgaactattctccacagctacacttttgccatttcaagaatgttatgtaaatggaatcatacagtaaccttttggaattggcttttttcactcagcataattctctggagagttcatccaggttgtcacaggtatcaatagttcatggtgcggacgtacaatttaacgtttcacccaccaaaagacattggggttctttccagtttttgactgcgacaaataaacgaatataaacattc

SEQ ID NO: 1803 - DNA, 304 bp, Homo sapiens
gacttctctatcaggcagcacccaccagagagcagttctgaaactgagactaccagatcagaaacaaacaagcaaacaaaaaaagacccataggagctgggagtgcccatccaagtacatccacatcatccagtaaaagaaacagaaccttgaagtcaaacagactggttagcacacacctcctccgtttgctagttgtgtgactaagggcagtttcttaactactctgtgcctcctctgtaaatatcaatgtgctaataatcccacctcgctggatcatttcaaaataaaatgcataacattg

SEQ ID NO: 1804 - DNA, 365 bp, Homo sapiens
  misc_feature 301, 326, 331, 345: n = A,T,C or G
gcctatccagtaacagagtctactgcatcatattaactgataaacccaggatgacaagagaaacatgggactcactcttcatttgcattgactccagctaagagcttcagttttcatgctttgcttcaaaattattggtgagccctgtgctaatttccatctcatcctagaagtcagttattttataagcatgtaattgcttataaaaataagctgggaaggaagaacattttggaagagggaggcatatgcctgaaagaagaaggggatgggaatacagtcagttgctattttggcccanaaatatgtcaggcaaacatgtaggnattgnatttccttgattgncttaattattggagaaagac

SEQ ID NO: 1805 - DNA, 298 bp, Homo sapiens
  misc_feature 66, 78, 87, 92, 103, 107, 261, 269: n = A,T,C or G
tgggactcctgcttagtcgaactgagcccagtgccgtggctcatgcctgtatccagccttttggangccgggcaggcngatcacganatcangaaatcaagancatnctggccaacgcaatgaaaccccgtctttaccaaaaatacaaaaaaattaaccaggcgtggtggcgggcgcctatagtcccacctactggggaagcttaggcaggaaaattgcttgaacctgggaggcagaaattacactgcctgagattgcatnactgcctncacctgggcaacaagacaagactccgtct

SEQ ID NO: 1806 - DNA, 459 bp, Homo sapiens
  misc_feature 287, 376, 412: n = A,T,C or G
gtcaccaggtatgcccctgggctcctgccgcagctgatcgggtgctaggtgctgaggatacaccgtctgggagaaagcaattggaagaaatgcaaagctcttcaaaggagacctataaagtcatctttgttttgttcattcttctcatgtttctgcattctgggcattctcctaaattggggagaaaccaaaatgcccagaagtcaaattctgcaactgtcatcaagcaaaatgtcaaatgagagaaccaaagtatgctggattctatattgttaggaagggatggntaatttgattgactcttgggagctatttctctagcattaagtaattctagggaacccttctgtgatcatctctgagtaaataaagaaangaaattgcaattcaaaaaaaaagccagcgaggccanttcagcttggacttaaccaggctgaacttgctcaaaagggggggggg

SEQ ID NO: 1807 - DNA, 585 bp, Homo sapiens
  misc_feature 376, 383, 466, 479, 503, 509, 535: n = A,T,C or G
attccggctgtgggctccttggaggaagagcagaggtgaagcgcttctcatcccaccacatcaggggtcctgcctcggcccggctcactgctgatgttgacctcggctacctggcagagtgtgctggccaggtttctccagcatgaagtcactctcgtttcccttggcgatgctccttccatcaaaaccagagtgtcccagctctagattccccacccaatctcctgtggctgtctcaacacctccgtcgtgaatccgtgcatcccttcagacgactgccttccgatgcggccctgacctgccccccctcccatcactgaataggactccttttctcctggatttcctgtaggaagtttcaaaatgctctccaggntttctgngggtggattatcctctggatctttctaaagtgaagtcctggtttcaccacaactcccccgacacagttgaacaactgtaccgnggggaggcttggncctcttgccccatttgggggatgncattgnaatcatgccaagggccctgacgtcanaacttcacctgacatgtgctcatgccgggttacaaaccttccaagacaag

SEQ ID NO: 1808 - DNA, 117 bp, Homo sapiens
catttgtcacattgcaaaagacctcaacgcacagctgactccagggtggaaagaccaacgacacgccgaaattcatcctgcactccagcctgggcaacaagagcgaaactctgtctc

SEQ ID NO: 1809 - DNA, 132 bp, Homo sapiens
  misc_feature 20: n = A,T,C or G
agtttggctgtgttgctcangctggagtgctgtcgtgctgtcatagcccactgaaaccttgatttcctagccttaagtgatccccccaccttggccttccaaagcattgggattacaagcatgagccactgc

SEQ ID NO: 1810 - DNA, 263 bp, Homo sapiens
atgaaccatttctggtgcagaaaaggctccgatgctgcttttatgaaggaacataatgctagcttggagatcacacaattgcagacctctttcctccggttgggaaatatactgaagaacagaagacacctgctctcccttcacctcccaccatgattgtaagcttcctgaggcctcactggaagaagctaagaagatgttggcgccatgcttgtatagtctgaagaaccatgagacaattaaacctcttttctttataaatt

SEQ ID NO: 1811 - DNA, 362 bp, Homo sapiens
gtctgacctgtcagtggctcagctgagattcaaacccggagccagcacgctgacccagttcacctgtgcccgacatcatgcacgacagccccaaatgttgagcaggccaggccggcacagaaaccactgcgcacagatggtctctcctccctgtcaccgtgacctccaacccctcccctcagcgctccgccccagagggttgctgcatcggaacttgcgggcacaggacctggacagccgcacttagcaagctcttcctccacgcccatggtgactgtaaggtggggagtctgggaccatgggggcacccacctccagcaaacacgccacaagcaccttggaaaattcaattctgcctccct

SEQ ID NO: 1812 - DNA, 141 bp, Homo sapiens
gttttttggggattgaagaagatgaagacattgcaactaataatgacactgctactacggttgtaggaaggaacgcactaaggaataactagaaacggatgaagaagatgatacagagccacgctgcaggactattttgat

SEQ ID NO: 1813 - DNA, 508 bp, Homo sapiens
  misc_feature 450, 458, 480: n = A,T,C or G
atggagtctactctgtcacccaggctgacctcgactcacagcaacctctgcctccagggttcaagtgattcttctgcctcagcctcccgagtagctgggactacaggtgtcaggcctctgagcccaagctaagccatcatatcccctgtgatctgcacctacacatccagatggctgaagtaagtgaagatccacaaaagaagtgaaaatagccttaactgatggcattccaccattgtgatttgtttctgcctcaccctaactgatcaatgtactttgaaatctcccgcacccttaagaaggttctttgtaattctccccacccttgagaatgtactttgtgagatcaccctctgcccgcaaaacattgctcttaactccaccgcctatccaaaactataagagctaatgataatccaccaccctttgctgactctttttcggactcanccgcctgnccccgggtaaaataaaaagccntgtgtcacgccaaaaaaaaaaagggccg

SEQ ID NO: 1814 - DNA, 404 bp, Homo sapiens
  misc_feature 299, 331, 336, 342, 365: n = A,T,C or G
gtggggtctttcattggcggcagagtctggggctggcatggctgctgggctgcttggctctgaggacccaccgtggagttggaacctgacttgtcgggcgctgaggacctgccaagtgaggaacattcgagttctgcagctgctgctaaaaccatggtgcatctccagggcccgtctatcaggtgccatgcgtgccatacggtgcgccacgtgaagtgcaccgtaaacatgatttaattcaactttcaaagccacccggatcgagaaagtgcctatgtcaccatcttgattattattgncaccattttgagatgagattattgaaactcanagaanggatgnaagttggttcaaaagtcacccanacagaacctggtgatttcaaaccaaagttctcctggctg

SEQ ID NO: 1815 - DNA, 237 bp, Homo sapiens
gaattgtcctatgccaagagagctgccttgccagaagtgacactcacttccaggagtcagcctgcatccagtggctgtcaaagggggagcaattctgcaggatcatccgggcccctgagctctctgtagaacagctgaagcgaccgcatggcctcaacttctccttccacccattcctgtttcctgccctccctgctcaggggtaactccaagagcaccctccagtaaacctcttgc

SEQ ID NO: 1816 - DNA, 218 bp, Homo sapiens
caacctatccaggataccatgtttcatttagttgtcatgtctcattgttaccagaaagtggtcccaactcagactccaagagagagtttttggacctcaagcgagaaagatttcagagcaagtccacagagtaaagtgaaggttctaaaacactatattttgggagtgcagcaagggttggcggaatggaactgaaataacaagtgggtttgttatcc

SEQ ID NO: 1817 - DNA, 226 bp, Homo sapiens
  misc_feature 191: n = A,T,C or G
cttcttaaatgctgcattgaaaggatgaaacagaacggatgtgaacaagagttccctgagaaaggacagctcttagagagataggataattactggactcaagaagataccaaatcatggtgtgcatttctgcgttgtgtttggaagaggaactaggattgttatgaaaaggaaggatgtgttcaacttanaagaattaaacctcaaccatctgtctcttcccaac

SEQ ID NO: 1818 - DNA, 177 bp, Homo sapiens
ctgaaagaaatataagaaatacaacctaatactgtaatgaagtgttcctgaacaaaaatacagataagctgttttaaaatattatctttatttgtatgctcatatcaggataactccaactaaggcaatttgtctaagtagctcatttatttaaaaagaaaagtaaaaatagcaatg

SEQ ID NO: 1819 - DNA, 502 bp, Homo sapiens
  misc_feature 446: n = A,T,C or G
gccgcacttggtgagagtcttcacggaccacagtgttgcacgaggtgattgtgtttgcagaggtttttttgtccttgaagagcacttagggctggagagcaggacacatgctgacgagcagaagctgacaggcttgctgccatgtgggaaagtccttggacgagttgtctgcttgcggagaggtgtctgcggctcaggtatgaacaaaagaaacatgcttcacttctgggcagaatccccaagagctaccatgaggtcctccgcttctcttttctccctaccacaagactgacatgactccaagagggactgctcctttagcctgggtccctagaatgaagattgatatgcagaaaaacttcagccagcctgcaatggacttgtggggttagcaataagcttttgttggtataagccactgagagccaggggctgtatgttactgnggcagaacttaactgaagctgactaacactggtactaacagaatcattttcaaatg

SEQ ID NO: 1820 - DNA, 229 bp, Homo sapiens
acaaatcataacgaacagagtccagtgagtccctctgtcgcaacaagttcaggatcactcaagcagtggagacggagtttcaccatgttggcaaggctagtctcaaactcctgacttcaagtgattcgcccacctcggcctctcaaagtgctgggattacaggcatgagccaccgtgtccggccccactacattcttaaagaagcaataaattgaccttgtttaaatac

SEQ ID NO: 1821 - DNA, 297 bp, Homo sapiens
gtcctattcacggttactgggagctggagcttcaacagatcttttgggaagacacaattcaactcacgacagggaggaagaattgcgagtacttgctactgctgtgatgccgtggagtgagcagaaagatcaatgccagatctaaaaggacttgaggctgtgagttccatctcttgttctctctcaccctcttgccttccactatggggtgatacaagaatgccctcgacagatgctagcactttgatactggatttcccaccctccaaagctgaaaaataaatttctttcctttat

SEQ ID NO: 1822 - DNA, 282 bp, Homo sapiens
gagcagaaatgtgaacagctggaggccggaaaagaaaggacacaagcggagaagaaacaccagaggaaaaataatcccttagagggtaaagaacaaataattgaataagggattaaaaaacacacaaggagagatccctggtaattacccttgacagccagtgtgaaaagggcccgggatgggggctttgtccctcccctctccgctcacacctctcagccgcagtaggttctttcctgttgctcctgtcttgatttagaataagctccttttctctaaagc

SEQ ID NO: 1823 - DNA, 269 bp, Homo sapiens
attcccccctgctgacagtgtgtgccctggcgatggagcagtgtccttgttgcagatttgaaccactttcacctcgtaaacagcagctggtgagaggaatggacttgcacattcattcgttttacaaatgaagaaactgaagcacagagaaggaaggaatgatttgtgcaggaggtggtatttgagatactcatcattttctctcattacccacatttgtttctactcctgtagtagtttggttaaaggcaatagactccttgttcctt

SEQ ID NO: 1824 - DNA, 174 bp, Homo sapiens
  misc_feature 141: n = A,T,C or G
ccgcagcgcctcccgctcctccgacgtggactcgtggctgtaatagcgcagcaggaagggccagacctccccgcggattgacacatcaataccgccaaagaaaatggcctggaggaagcggcaaaagttggtgaggggatnaaatggggcagctcaaagaacccccaaatcccc

SEQ ID NO: 1825 - DNA, 405 bp, Homo sapiens
agaaaatacctggtaagccctaatggaaaccatctgttagaaaaagaaggagacagaatcgtggagctctgttgacttccctcgtcttaccagcaaagagaagaggtgtagtaattcttaaaaaggaagaaagaagagagatcaaagtgggagaaggaaaaataaaaagaaaaaggactaagcactttcttctttcctctgagagactgcggtggctctcccacctttccggagactcgtcagcacctgcctggtggacagcaccacatctttaaattctaaggttctaacccctttattcccaaattctggagttcactaacaaagtggttttcattctttaaaaaatgaaatgaaaccaaagagggacacacagagggcttccaaaataaaatgctagatctt

SEQ ID NO: 1826 - DNA, 434 bp, Homo sapiens
  misc_feature 389: n = A,T,C or G
gacagaagctttttagtttgacatcactaatcatcaaggaaacacaaatcaaaatcacaatgagatatcaccttatacatgtgaggatggctattatcaaaaatacaaaacacaagtgttggcgaggatgtagagaaattggaacccgctgttggtgggaacgcaaaatggtacagccactatagaaaacaacttccaccccaagaagttgtgaatcacacagtatttctgaaaaggcatccttgccctatgcaaggctgccaatagccaaaaggaggcatctgagggaaggaaaaaagaactgcaccatgcatgcatgaagttggcaatttgcaaaagaaatctgaaacaacattgcaggcagaaaaagcaggaaagaggagatggtnagagacataaatggggaattgggggcaacaggaaattctggcccc

SEQ ID NO: 1827 - DNA, 167 bp, Homo sapiens
ggaccatacaacataatctttatagtctccagcaacaggtatgccttcccctctacactgtgcttcttgggggctaaggaagaaactgagactgcatttcatccttcaggagtgagaagtttttgctccagtcataaatacttgctgaataaatgaatcttctattt

SEQ ID NO: 1828 - DNA, 254 bp, Homo sapiens
actgagatatggttgaacatatacttaggacacgtaataactatggaacttcatcacaaacacagcactgaggacatgttctgaatacagacaatatggaggcctcaggctcagaggatggcagagtcttcagatggatggagggagctgcagtcactgaaccactgcagggagagaagtactcacagaccaggaacgctcaacttggactgttatgtgacagagtaataataaacttctattttggtttgagt

SEQ ID NO: 1829 - DNA, 422 bp, Homo sapiens
  misc_feature 387, 389, 396, 402: n = A,T,C or G
gatcctgtgcactttattcttccctaccagcctcagaagccacgtgctgaagacagtgaagttctgtctgggaagaagcatcgatccctaaatggctgcatggagcagagcagagatgtctgctcactaagttggttcgaagctgaggaggaaaaaaattaggtgctaggatgctggagagatcctcagaaacccctctacatgaatcatttaagtagatgaagagctagattgcaataatcattgggaggagaagaagaataaaacatgagattccattcacatcccagaattaaaggtaaaatgggtaaaaagtgacattttcaaacctggaatcacactggaacggtatttgcatcttggtaggtaacaataaaaatttaactntnaaaatanggcccngggggggggggtcatgcccg

SEQ ID NO: 1830 - DNA, 327 bp, Homo sapiens
  misc_feature 17, 19: n = A,T,C or G
ttgaagcccagtatttnanatccagctggaatcacaggggtttcttgtttggcccctccctgaaaccctggaagaatctggagtcagcagaagtgtgcatgttgcaaaaatcacagaatcatgtaaggaatgaaaggaaagcccccttcttcaaccctgactccaacaatcccactgctcaaaggaacccagataatacgtaggaaatacatacctacgtgtttcttacatatttagaaatatgtcaacataagtcattataaacataagtcattataattaagtcatttgtacttgagaagtcctaatgtacatggttacaatgca

SEQ ID NO: 1831 - DNA, 460 bp, Homo sapiens
  misc_feature 428, 430, 437, 440, 442: n = A,T,C or G
ggattttaccggttcggccatatcagggacacttgaaaatttgcctacaaatatttgcctgctttccagtgcagcccttggaattaaaaaggaaaattcctgccctcagataaagatagggtcttgctgtgttgcccaggctggtcttggactcctggcatcaagcaattctcccaccttggcctcccagagtgctggggttacaggcatgagccactgtgcctggtcaactgtaacatttgattgcttggggctgcctgaagcatttggaggatgagaggagagcatttattttcttttggagagaaatctcaacagtatgggcatagctggctccttttattcctgcttttcatcgtctttggctaaactgccatggagacctggccccttctaccttattttagacactttaaaaaacacgggcncnctttggntananattttaaaaaacccccac

SEQ ID NO: 1832 - DNA, 305 bp, Homo sapiens
  misc_feature 92: n = A,T,C or G
gagttctgaaaccacctcatacttggaatagaagccatgtgaaaacaaagcccctgcatcactcctatctgcctggaatgctgttgtgtganggtgtaatgtttgaagctgtggctgccatcttgtgacaaaggggcactccgtgttgtcaggatgaggacggcagaggaagatgctggggaaagcctggatctgcggacatctctgaaccactacgtcctgggaccagctatctgggcttcctgttttgtgagataatttcacgtatttatgataaaattattaaaatttgggtatcctgttat

SEQ ID NO: 1833 - DNA, 174 bp, Homo sapiens
gctagtcaagtgaagcagtgggagtggaaaaggagcaaagaaatctgtaactggttgtgattccatgaactttttgaaatccccttgtattggcttccttccctcttctgtcttacttctctactccctacaagtgttttctgggatcacctccaaataaactacttgcaatct

SEQ ID NO: 1834 - DNA, 98 bp, Homo sapiens
  misc_feature 21, 44, 51, 67, 70, 85: n = A,T,C or G
tacgtccaaactgagggatgntaccggttcggccatatcagggncacttgnaaatttgcctacaaanatntgcctgctttccagngcagcccttggaa

SEQ ID NO: 1835 - DNA, 291 bp, Homo sapiens
aaacagaactccagatttaaaaataaaggactgtatttcccagcatcccttgcagctaggtgtgggcatgcaactaagttcaggctaatttcttcctgaaagcatacaaagaacctacaactgaggcctcctgggaatataccaaggcaccatccaccccggggcctttgtacttgctgttccctttgcctggaagactctttctccagatatctgcagggccccaccctcaattcattcctgtattagtctgttctcacactgctaataaagatataccagagactgggt

SEQ ID NO: 1836 - DNA, 271 bp, Homo sapiens
  misc_feature 65, 69, 81, 83, 94, 95, 102, 118, 171, 204, 229, 230, 232,235, 242, 250, 252, 257: n = A,T,C or G
attctcatcactgaatctccactgaaaaaaacagggtttggcacattgttaatttactgaaaagntgangccaggcgtggngnctcacacctgnnattccancactttgagaggccangatgggaggactgcttgaggccagaagtttgagagcagcctggtcaacatagncagacctcatctctaaaaataaaaataaagtanataaaacataaaaaaagaagaaacnncnaanaaaaaangggcctcngnggccntttaacttgggatt

SEQ ID NO: 1837 - DNA, 285 bp, Homo sapiens
  misc_feature 18, 21, 24, 36, 56: n = A,T,C or G
tggggagatgtctgcgtnctnctncttgaggagaanccgggataaatggacttgangccacgaggagccagtgagtggtgcctggaacaccgtatgatgcccagaggagcccagcagtcatgctctgacagcagcatatggtgcgcactggaagaaggggaaaataaggtcaggaaggcagactgggagcttggattcgaggctgaagaactgccatcaaatgtttttgaaaggtgtgaaataatcaaaactgtactccatgatgattaaagctggcatagtgtg

SEQ ID NO: 1838 - DNA, 400 bp, Homo sapiens
  misc_feature 355: n = A,T,C or G
atggcgtttcgctcttattgcccaggctggagtacaatggcacgatcttggctcaccacaacctctgcttcctgggttcgagtgattctcctgcctcagcctcccaagtagctgggattacaggcatgtgccaccaagcccagctaatttttgtatttttagtagagatggggtttctccatgttgttcaggctggtctccaactctcgacctcaggtgatctgcctgcctcggcttcccaaagtgctgggattacagatgtgagccactgcacctggccaaaagtgaagtcttaattcctaattactttgtctcctcttgttattaacttcttttcacttcttgaatttactgnactaactgcaccaaaagaaaaatttcttgattatataattcatgc

SEQ ID NO: 1839 - DNA, 459 bp, Homo sapiens
  misc_feature 27, 47, 53, 72, 77, 83, 95, 133, 155, 168, 180, 198, 212,246, 411, 417, 420, 427, 445: n = A,T,C or G
atccattatttgggcaggattctgtanggaaaactcatcaccacttnatatancatcagccatgcggctcanctganggctgntggatccacttntaagatgactcactgctggctggctgttaatgctgggntgaggccctggggccttggttngtctccacattgncctctccattangcctggacttcctcacanaatggtggacgagnctctaagggtaaacatcgcaagagagaaaaccanacaagagagcaaaacttgccttttgtgacctagcctcagaaatcacatagtgtctattaattgaagcaagtcccaaagtcccacctgggttcaaggggaggagatactgactacactgtccttgatgggagggtggtaaagattctggaagaaaaatgggaccanaaatgntgntgcaccnttttggggaaagggaatntaacccaaccgggt

SEQ ID NO: 1840 - DNA, 423 bp, Homo sapiens
  misc_feature 368, 370, 379, 407, 409: n = A,T,C or G
attcattctcatagaagggcatcagaggaagataaagaaggatcctcaatgtcagacatctgagcccaagctaagccatcataatccctgtgacgtgcacatatacatgccccactccaactaatcaatcgaccttgtgacattcctcccctggacaatgaatctcatgatctcccaaccctgcaccttgtgacccctcccctgcccacaagagataaccacctttaagtgtaattttccactacctacccaaatcctataaagctgccccacccctatctccctttgctgactctttgtggactcagcccacttgcacccaagtgaaataaacaagccttgttgctcccaaaaaaaaaaaggccagngnggccaattnagcttggacttaaccaggctgaacttgntnaaaagggggggact

SEQ ID NO: 1841 - DNA, 238 bp, Homo sapiens
tttcagagaggaggggagctgtgcagagatgtgctggaggagtgcctattggtgaccaaagacatgggatgctgaagcgatacagaatgccacctggaagttcgttgaaaccattgccgactaggtgtggtggcttcgtgcctgtaatcccagtactttgggaggctgaagcaggaggatcactggagaccaggagttcaagaccagcccgggcaacatagtaagaccctgtctctac

SEQ ID NO: 1842 - DNA, 151 bp, Homo sapiens
aaaaaggtaatatttaagcctgaagtttaaactttctttgagatccactctgaagatttattaatttcttggggtttgtgctgcattctgcccctggctcccaccatgtatccatgaggcatgcatgttaacaaacttctgtttgattttc

SEQ ID NO: 1843 - DNA, 423 bp, Homo sapiens
  misc_feature 82, 380, 399: n = A,T,C or G
gtggccattagggtggtccagaaggctggggaagcacagacaagggtaactgcaaaccgacagcacaatgggatacctcagnatcccgccaggatggctgtaactcaaacgacagcaacaccaatgcagtagacatgaggtttcatcacgttggccaggctggtctcgaactcctgacctcaagtcatctgcctgcctcggcctcccaaagtgctggaattacaggcgtgagccaccgcacccggcctgtttctaccattctggaaaacagtttggcactatactaaatgcctcagcagtttcacttttggaaccttctttgccctcacccctgggaaataacatttgccaaaactcattgaactgtactcttaaaatgnggacattttattatatgtnaactataattcaataaaattggtt

SEQ ID NO: 1844 - DNA, 456 bp, Homo sapiens
  misc_feature 276, 336, 360, 377, 398, 402, 411, 413, 435, 442: n = A,T,C or G
gattatggattatggatctctggaataaaaacatttagtgtcacagcaaaagaagttttgagtttatatacaaattaagtaaaagactaattttggttttgaaaaactcgttctctaaacttttacaggaagtttaaataaattacatcatgaacaaaactgcagtatgccagttcctatcctcatgacctcacgattctgcctgagctccacatcaatgaaaggaaaatcggataatgaagcacttagtctaatatctcaatagcaaccaccaantaggattactttttagaaaagaaaaaaaaacctaaccttatatgtaaatgtatctagtgngcaaatgacataatgcttatatgnatggaaatctatctagngggccaatgacttaatggccngggnggggaaacngngggcgagaagcccccaattccnccctccnggttttggaaaaac

SEQ ID NO: 1845 - DNA, 249 bp, Homo sapiens
gataaagtttgatccagcatattctaaaatgctacaagactgccagcaagtttcaaagacacatcagagagaactcaacggcctgacctggagaccaggaggatgacattctcattaggcaagagatgctggaccttctgcagtaatgagaaatgaaagtcaccactctgctctaaaagcaggggctatttacccctgacctgacacacttctcaaagctctcacaataaaggcacccagcatccactt

SEQ ID NO: 1846 - DNA, 205 bp, Homo sapiens
aatttgagaatctgatgattgcagctggaaagactgcagagagcacctgggtcaaccttttcattttgcataaagggaaataggcccagagaaagaaaagggactgtcccaagatcgcacagcaaccattttgaccttcaacaagtactccctgactccaagcaataagggtgaaaaaataaggaataaattgtataaagcacgt

SEQ ID NO: 1847 - DNA, 458 bp, Homo sapiens
  misc_feature 14, 19, 20, 33, 43, 57, 62, 78, 80, 87, 101, 103, 141, 145,156, 258, 268, 284, 288, 317, 319, 330, 355, 358, 395, 398,401, 422, 429, 430: n = A,T,C or G
agtatggtggaaangatgnnacgcccactccangcctaacctntaggaggactggcngtttntgctatggcctctggnanccatganctgccatgaaaaangncaaactactctgctggagacacccacctggagaagccntggnattccatgganaggcagacggacccagctgagctcagtgttccagccatccccacgaaagcaccaggaacctgagtgaaaccatctcgatcctccagcatagcacaatcaccngctgaagatnactgagtgactctagncggnagctccatggatcactgaaggatcacccntntgaaccctgcncaaatttctgactcacaaaactgtngancatacaatggttggtggttagggggcagtttggtatnctnttncaattaatttgccggaagagnccccaannaaaaaaataaggggggcccggcaagggc

SEQ ID NO: 1848 - DNA, 285 bp, Homo sapiens
tgcttgtacggctgctatgtccattcctccatcatccccaccttccaccggaggtgctactggctccttcagggcctgacagggtggtgaaccccacggaaacatcagggcagcctgggcaagacaaaggcagcttcactccacaactgtccagaatcaaggatccgggccgggcgtggtggctcacgcctgtaatcccagcactttggaaggccgaggcaggcagatcacgagatcgggacaccgagactatcctggctaacacggtgaaaccccgtctctact

SEQ ID NO: 1849 - DNA, 448 bp, Homo sapiens
  misc_feature 378, 387: n = A,T,C or G
gtggaaatgcatttccaaaaccaccagctggctagaactttactggacctaaacatgaaagtgcagcaattgaaaaaggagtatgaactggaaattacatcagactcccaaagcccaaaagatgatgctgcgaatccggaataaagaaatgcacacgcaagggctgggcgcggtggctcacgcctgtaatcccagcactttgggaggccgaggcgggcggatcaagacgtcaggagattgagaccatcctggctaacactgtggaaaccctgcctctactaaaaaatacaaaaaattaagccagacgtggtggcaggcacctgtagtccctgctactcagggagtcttgagggcagggagaaatggcgtggaaccccngggagggcnggagcttgcagtgagcccgaaatcgtggccactggtactccaagccttggggccaacaaga

SEQ ID NO: 1850 - DNA, 360 bp, Homo sapiens
  misc_feature 20, 22, 35, 120, 151, 163, 184: n = A,T,C or G
ctacaacagggtgcctggcncnaggagatactcantaaaactctcatctgctgtgtcattaaggggaacacttaatggctcacgcctgtaatcccagcactttgggaggccgaggcgganggatcacctgagcccaggagttggagaccancctgggcaacanattgagaccctgtctcaacangagaagaagaagaagaaaaaggccaggcgccgtggctaatgtctgtaatcccagcactttgggaggccaagaagggagaactgcttgaggccaggagttcgagaccagcctggtcaacatagcgagacaccccccccatctcaaaaataaataaatcaaaataaaaaataaagagg

SEQ ID NO: 1851 - DNA, 387 bp, Homo sapiens
  misc_feature 9, 357, 359, 364: n = A,T,C or G
ttcttcgtngactctggaatggagctggaagctgtcatcctcagcacactaacgcaggaacagaaaaccaagcactgcatgttcccacttataagtgagagctgaacgagcagaacacatggacatatgaaggggaacaacacactctggggcctgtgaggtgcagggagagcatcaagaagaacagctaatgggtgctgggcttaatacctgggtgatgggttgatctgtgcggcaaaccaccatggcacacatttacctatgtaacaaaccttgacatcctgcacatgtaccccggaacttaaaaataaaagttgacaaaaagaaaacataaaaaaagggccaggggggccaatncntttgnacttaacctggctgaacttgttc

SEQ ID NO: 1852 - DNA, 418 bp, Homo sapiens
  misc_feature 7, 16, 25, 30, 31, 32, 34, 37, 44, 57, 80, 84, 91, 99, 131,149, 181, 188, 193, 214, 234, 307, 308: n = A,T,C or G
gacgggnactctctgngatgccatnccagnnntnacntgctacnggctggctacctnatctgtggagctccagagaccangaangataacnctcattgncatagctacttgtcagcgcataagaaagtgancacacaggtggtaccaangaccttccttttctggttccaagataatggcnggcaccnaaggnctattcctctaccctactggnttatcactgggctgaagaancccaagtagtgaattacccactaggaccctggaagaggaagtacaacggttatcctcagttttccctggaatnnggaatgagctcctgggttactgaaagtctactttggtgccttgaatttaacccaatcccatatgtgataattattttagcatatttgataataaaagaatttaagaaggg

SEQ ID NO: 1853 - DNA, 363 bp, Homo sapiens
  misc_feature 332: n = A,T,C or G
gtcaagctggtctctggtgtccatggggacacttcaggagaaaccgattaacattgagatgtgtggaaacaggatcaataattttcagtaactgaggaagattaccagaagccaaggcggcctttaacagagactgtgcagctctgagcccaggactgttaagcacttggcaggcaatggagaaagtctaattgtggctgacgatgagtcattttacactattgtcacacctcctttatccacattccattttaggaacagtataactttcccagccagaaattgtctaatttaaaccctgactcttacctgtgtgaatcaaaatgactcanaaagtgcaaataaaataaccctgaggagtcc

SEQ ID NO: 1854 - DNA, 332 bp, Homo sapiens
gttccaggagttgcagaaatgccaccaggatctgcagaacacattgcaagacaaggagagctgggaggactcagaccctgacctcatccaaaagtgaaaaaccaatcctgccaaagtgaatgtattttctctccccaaaggcagacttgagacccccagcttcagggtggcttctgcctgacttccagagctccagccagtgccttttgtctgaaacctccatgtccaggacccttgggcggagaagaatctgctggacactgcttggggctggaccctgagagcgctcacatttgacaccccagaaagcaaataaaacagttgaaatatgt

SEQ ID NO: 1855 - DNA, 394 bp, Homo sapiens
tcacagcctgggctcatcacgaaaggcagccagcacttcaacggactcactgcctctacctttctccttgcttggatgaagaatctgaatctagaagcccaccaaattcatctaacagtagtgcaagcagatattgctttggaaaatatctcagcagagaacactcctgggatgtatttcatcagtctgatacttccaactctgccagggaacaagctcaccaaaggcttctcatcaaacagctctgccctaaacaccctgggggattccccaacagtgtcttgcgggcctaatgacactcatgttccttctcatgcttacctttctttgcctgacgtgagtgcaaaaacctatcttaagcaagataattgtaaaaataccaaaattaaatgat

SEQ ID NO: 1856 - DNA, 373 bp, Homo sapiens
  misc_feature 350, 354: n = A,T,C or G
ctgattcctccttcctccatactcccaaggcacctgaggtctggctcttcaggctgtgtgacgacagggactttaaagaggcaatgaaggtaaaatgaggtcatcaggatggactccgatataaccggtgtccttacaagaagagaagacaggacacgcacacaaagcaagggtcagccatgtgaggacagtgagaaggcggccgtcgacacgccaaggagagaggcctgggaagaaaccaaccttacaccttgacatcagacttctggtctccaaaactgtaggaaaataaatttctcttgtttaagtcaaaaaaaaaggccagcgaggccaattcagcttggacttanccangctgaacttgctcaaaagg

SEQ ID NO: 1857 - DNA, 431 bp, Homo sapiens
  misc_feature 393, 395: n = A,T,C or G
gaggggcacacctttcaggcctagccctcggcctggatgaaggtgtggctgagcatccctgttcctggaacttggcatcagcatcactgacatcggaagcacacggaccccctcccacttcgacaagcatcaaacccatctcttctccttgctctggccaggtcagactggagccaactgtgctgcagctcctgtggaagccttggcagggaggtgagggggagcaccagttacaagcaaaggctccgagtgcaaagagccttcgcttatgattcaggaatctctgggcaagttacctaaggtatctgagccagcagttcgtcatctgtggaatggggagaatggcaacacttctcataagggttgaagtaagggaataaaatgatataatgngnattaaacccttaaaaaaagggctggctggcatataa

SEQ ID NO: 1858 - DNA, 253 bp, Homo sapiens
gtatttttcagaccctgcattctgttggatctgctgatgccacccagactgataaactggttcatctgaccttgtggccccccgacccaggaactgaactcagcacaagaagacaggcttcaactccctgtgatttcatccacgacctaaccaatcagtactctccactccctagccccactgctccccaaattatcctttaaattttgggggaggctgctttgaataatgataaactcctgtccttctgctt

SEQ ID NO: 1859 - DNA, 403 bp, Homo sapiens
  misc_feature 161, 165, 176, 181, 185, 189, 190, 194, 196, 197, 204, 205,208, 217, 224, 234, 241, 243, 250, 261, 266, 280, 301, 310,311, 312, 344, 351, 365, 375, 389, 390: n = A,T,C or G
atcctgcctcccacagtcaccctgctcccaagtgcaacctctgtctgaccctgcatggtgtgcggtgccctcctgcctcagcctcccgggtagctgggactgcgggcctgcgccaccacacccggctaattttttctatttttttttttttttttgggggnaaanggggtttaacnatttnggcnaggnnggtntnnaactccnnatntgggggccnacccgcntgggcctccnagggggntnaaattgnaggggggggcnaaccnccctggccccaaanaaatttttttttggttaaaantttttgggnnnggattgccccctaaaatgttccccaattgggncttattnttttaaaggaaagncccaaagggnactttatttttagnntaggaaaaaaaac

SEQ ID NO: 1860 - DNA, 132 bp, Homo sapiens
gcatccaggtatacacacaagctgcatcgtgtcactgcaagcggctcccagagttgttcctgttcatccaggaagaaagaaaatcccgccaaagattgagagagatcaataaatgtatttccaaagaacctg

SEQ ID NO: 1861 - DNA, 435 bp, Homo sapiens
  misc_feature 9, 322, 352, 364: n = A,T,C or G
tagtaaaanggggcctgcttccccgtcaccttccgccacaatcgttaagtttcctggggcctccccagaagctgctatgcttcctatacagtctgcagaactgatgacatggcatgaaggccctcaacagatggcagcacctttaataatgaacttcccagcatccagaactatgagaaatcaatttattttcttataaactacacaatctgtggtattgttatggcagcacaaaatcagactaggacagaagaattctccaacgaacccattcaggactggtgctttctgttttgaaaagttcatatttctttatttttgnataaataataccattttcaagttataatgntcattataatgncatatccactagaaaatttaaaaacactgccatactgagggttttaaagaaaacaacatggactagcattt

SEQ ID NO: 1862 - DNA, 330 bp, Homo sapiens
  misc_feature 11, 31, 35, 39, 44, 56, 59, 74, 75: n = A,T,C or G
gaagaatatcnaggagcccttaaaacacttngatnaacnatacnaggttatgcganagnaccctcattttttanncaagattgcaaagaaaattcatttcagttctacatttggtgccaagcgttgttagttgcagataaataagatagaatccagctcttaagaaattcaatctagtggaaaaaaacataaatatttgcagttaattttttaggcgtcaggcactgtgctaagtactctcattggtgaccttgatttttaccctcttaatctccatgtgctcccccttcccaaatacactccaagtaaatataaaatcttagtgaaaac

SEQ ID NO: 1863 - DNA, 351 bp, Homo sapiens
gcttaatttttcctgatcatgagagaagaacacagatgtagctgaactaaggagcaaaaacccggcatcaatacctgctacagcacagatgcagcatgaaaaattatgctaagtgaaataagccagtcccagcagacaacttgctttttatttcagaggcttataggcaaatctatacaaagaaggtgggtggttccctagggctgagggaggaagggaaaactagtgaagatggctaaatgatgtgggggtttgtttttagggtgatgaaaatgttctaaaattaattgtaatgatgacggcataactctcgaaaatactaaagttaatgaattctatactttaaatgag

SEQ ID NO: 1864 - DNA, 271 bp, Homo sapiens
ctccagctgcatctgatgtcactgctatggcagtgaagaatgaaaaccaaaggacaactggctacttaaggaattaagcggactaaaatgaaaaccattcacagaagcagttccagtactctggctgagactctgttttcctacatacagcccacattctgaatatactcaaatctacgcaatttcaaacttagaaaactttaactgctgccccactgaagccattttcaagctggaatcatgtataataaactactccatctatttcacc

SEQ ID NO: 1865 - DNA, 303 bp, Homo sapiens
ctccacctgccgagttcacgccattctcctgcttcagcccctcgagtagctgggactacaggcgcccgccaccacacccggctaatttttttgtatttttagtagagatggggtttcaccatgttagccgggatggtctcgatctcctgacctcgtgatctgcctgcctcggcctcccaaagtgctgggattacaggcgtgagccaccacgcccggccgctcttttcttaaatatctggtggaggcctcaaaatcaaaatgtctaaaacagaactcatcatcaataaagccattcgtccattt

SEQ ID NO: 1866 - DNA, 185 bp, Homo sapiens
tttgtattcaagacagaaaggaacacctacccaggagctcaatcacattgcatgcacagacaccgacaaccacacagacgtgtgaacacatccccccaacgtgagcaaccgcagcataatgggactcatcccatccaaatacccatttcatctaaagtgtaaaaataataaaaagaacttcttgg

SEQ ID NO: 1867 - DNA, 294 bp, Homo sapiens
gcaaaacattctctgcaatgtggggtgagtggcaatgagaacacctcagaagacactgggtagctttttcaaactcttccctccacattgagattcagatctcagaagtactgggggaagagggttgagacttgtggattataaatcaaaaaaacctgaggttctgctgcagcccttcctaccaccacgccgcacctccctaccttgagaatcgctttctgtctgttttgatgagaacactactttcgccccaaataatccatcatactgctattaaaagtcaagttccaaacc

SEQ ID NO: 1868 - DNA, 512 bp, Homo sapiens
  misc_feature 307, 441, 455: n = A,T,C or G
aaaacctgtggctggtctgggtattgtcatggttcctcatctcttctggaagcacacaatgagagacggagtctcattctgtcgcccaggctggagtgcagtggcgtgatcctggctcgctgcaagctccgcctcccgggttcacgccattctcctgcttcagcctcccgagtagatgggactacaggcgcctaccatcacgcccggctaattttttgtatttcgtttagtaaagacggggtttcaccgtgttggccaggatggtctcgatctcctgaccttcttgtgatctgcccgcctcggcctnccaaggtgctgggattacaggcatgagccaccgcgcccagccatatttttaaattatctaaagaatgtaattagattgtttataatttaaaggatgaatgtttgaggagatgaataccccattctccatgatgngcttatttcataantcatgcctgtatcaaaacatctcatgtaccccataaatatatacacaaaaactttat

SEQ ID NO: 1869 - DNA, 231 bp, Homo sapiens
  misc_feature 4, 8, 12, 19, 52, 56, 62, 67, 68, 82, 91, 95, 99, 101, 107,109, 111, 149, 156: n = A,T,C or G
aganggtntctnacgatgntgcccacactggccttgaactcttgggctcaancgancctccngcctnngccttccaagtacnctagactanaggnacangncgctgntnantgatgcacttttaatcccaatttttaggagctctgtgnaatgttntcaagcattttccattttttaatgatttaagtatttgagcactttgagctaattaaatttgaaattgtttaaaat

SEQ ID NO: 1870 - DNA, 262 bp, Homo sapiens
  misc_feature 206, 210, 212, 226, 241, 249: n = A,T,C or G
accaagactgaaattggcctgcagatcaaagaccatggcaaaaaattcctgacattggaaactgccttccaaaacatccctgtgcctcatccctttctacacattccatataaagagattgtttcattttccacctggcaacgcttaaattgttttatttttcttcattaaaaccaccacgcctcttcattcaaaaaaaaaaaggncagngnggccaattcagctnggacttaaccaggcngaacttgntcaaaaggggggg

SEQ ID NO: 1871 - DNA, 638 bp, Homo sapiens
  misc_feature 398, 498, 533, 548, 565, 574, 578, 609, 623: n = A,T,C or G
cctcgcgggttggagggaacaaaactcttcgcgggtctttcccagtgggggaatccgaacgggtattcgaataaagcttttgaatgaagcccgccacaatggggaatcgggcccatttgaaacaaagaatgggaattggcacgccaagggttcttcccggcccggctttggggtgggaagaaggcttattccggcttattgactgggggcacaacaagacaaatcgggcttgctcttgaatgcccgcccgtggttccgggcttgtcaaagccgcaaggggggccgccccggttcttttttgtcaaagaacccgacccttgtcccgggtggccctgaaatgaaactggcagggaccgaagggcagccgccgggctatccgtggggcttgggcccaccgnacggggccgtttcctttgcgcaagcttgtggcctcgacgtttgtccacttggaagccggggaaaaggggacttggcttgcttattttggggccgaaagtngccccggggccaagggatcttccttgggcattttnaacctttggttcttngccgagaaaaaggaatncccattatngggnttgaaggccaaatgggcgggggggttggaanaacccctttggaanccgggtttacccttg

SEQ ID NO: 1872 - DNA, 432 bp, Homo sapiens
gaggaagagaagggcagggagcaagagtaaaggctttggagctcagcaagactgggttgaatctcagcctcattgtttacttgatgtgtaaaagcagggcctcactctgtcacccaggctggagtgaagtggtatgatcacggctccctgtaaccttgaactgcttgggctcaagcagtcctcctgcctcagcctcccaagtagctaggaccacagcaactgaagcctcctgccaacagccatgtaagtaagccatcttgggagcaaaactatctggttctcttcagaccttcagatgactgcagcctcagctgacatcttaactgcaacctcatgagagaccctgagagccaaatctacctttctgagcaactatcaaacttctgacccacggaaactgtgagataataaatattttttgtttaaaccatg

SEQ ID NO: 1873 - DNA, 410 bp, Homo sapiens
aatgcggagtgcccccgaaaagtgcctcccaaaatgtctcaggtcagagctgcaacctgcgcaacaacggctaagatgaggaaaaccaagacacagaaagaaaaccattttgcataactgacgaacctggatgagttcatcaccaaactccaagaaccctccgctaggtctctgcctagtgtccatgaaccagcagcaccctcattacctgggagctgaacagaaatgcagaatcctgcacccaccccagacctactcaatcacactccgtttcaacaagatctccaggtcatacgtacgtacagtacagtttgggaagcattgctctaggacagaaagagtttctcaaaattattagatgaatgatcttattagacccatgctctaaataaatgtaaagataatttttg

SEQ ID NO: 1874 - DNA, 195 bp, Homo sapiens
  misc_feature 25, 39, 41, 62, 72, 94, 122, 145, 158, 179, 180, 181: n = A,T,C or G
tctggggagctcctggttagctccngctgagatactatnanactctgtgaagcccggattanaaaaaagatncaaaatacattccgaggagcanatctttctgtggtaacactgcattccanatgtgcgaaaaagacagggaaanacatgaactgcantacattacggctaaagggagnnngcttattaacttcc

SEQ ID NO: 1875 - DNA, 241 bp, Homo sapiens
  misc_feature 95: n = A,T,C or G
ggagaaggtcaccgtgatgtgatggaaaggcagaaatcaatggtggctggctcctcagtgatatgagtcaatccatcagacagactggtggcagncacccagccttcacagctaccacccccatgctggcaaatgtcacatttggaattcatttgcatagctgggtagcactccctgcggagttacattgaacaattttgcagctgtgacagcttgaaatagaaaagctaatgcaactatc

SEQ ID NO: 1876 - DNA, 357 bp, Homo sapiens
  misc_feature 3, 19, 21, 25, 35, 38, 39, 41, 54, 55, 92, 108, 156, 172,173, 189, 193, 210, 297, 310: n = A,T,C or G
ccntcttcttacaaatgancngacncagatgcganganncncaacgtccacatnnttgaagcaaagttacttgtggataaacaaagcattangaaatggactctcatntctctcaaaaagtatcaaagaagtgaaattcatcagaccactgtgtcnagacaatgagacgccnnatgccagattccttanttgncatgattgcttccttanccctccctagttcctgttttcctgctcataagttacatttcttccttgctatataatcccctaatttcggctggttgaggagatggnatccaaactgatntcccatatccttagctgtagcatgcaattaaagccttcttccttggc

SEQ ID NO: 1877 - DNA, 329 bp, Homo sapiens
  misc_feature 18: n = A,T,C or G
atatgctgcttggcaacnattatatcacacatcacatacgtctggatcaagtgttactttgcaaatattcagctatggcattaaagatcctttcaagaacccttttgaatggcttctctaggtgacacagcaaatggattcctaagtatgcatccattctcccgggtaaaccacgagtctcaaaaagtaggcagcaggctggacccggtggcacacgcatggaatcccagcgctttgggaggccggggcaggaagttgcttgaggccaggagtgcaaaaccaacatggcgagactctgtctgtataagaaataaaataaattatccagg

SEQ ID NO: 1878 - DNA, 443 bp, Homo sapiens
  misc_feature 396, 398, 410: n = A,T,C or G
atgtggacaacgaacaaagacaatagagcagaagtgttggcaacacttcagtatgagcagactggtggacagtgagagattacagaagaacacagctctgggccagcagtgctgctgtcgaggtgatcccagcaggcagtgccacccaccaggaatcataaactgcacaaggccagaggtgagtccttctgtaaatacatagccctagctccaagcatttaattgtcacaaaaacaacaaaaaatactcctattaacagtgcaatttctctttccaaggtctacatcgagagaaagaatattaggatgctaatattgcattgggtcattggagcttaatgtttagaaataataaactaaactgttttgtggtctgaccaaaaaaaaaaaggccagngnggccaattcagnttggacttaaccaggctgaacttgcttaaaagg

SEQ ID NO: 1879 - DNA, 460 bp, Homo sapiens
gccttcattatctcacttcacaagaagtcaggtgccaagcagatccaagctcattcagaggctgcaccatgtcaactgggacccaggtttcatccatgtttctgctctgtcattatgtcatactccaagggagtcgccagatgactgctgcagctgaggcttttctttcacagcatctaacagaggctggggagaggctccatgaagcacgtggtttcctaataccagaagaaaattcaagccttttaacatggcagtccacagtggtaggaggcggaaagagactttgggtattcaaaaatgggttatcaccttctacttctttggctgcatgatactcagagataccattcatgtctatatctaaatgacactcatttttttcctttctaaaatggagcacctggctccaaagttcttggacatctgggtgatgcagtggtttcttcatttatccctt

SEQ ID NO: 1880 - DNA, 426 bp, Homo sapiens
ttggttggatccatggatgtgaaacctggggataggaaaggcatactgtatcccctgccttgtagcagctcacaatataatggggaatggttccctgccagcgaacatgctgtgtttcgttcaatcattcaaaacatttgagtgtccactgtgtgccagacgtgctggtccctctgctgtgcacatcatcctccttggtgtgatgctccttcgaggctcagttcagatgctacttctctgcttggcttttccagactgcatgatacccaggctgcctggctgggtcttcccatgtattccacccctgacctgtactggccctgttgccaactatttatcaaattatgtgattaatatctgggtattttcttacactggacctcactcataagggcaggagctctgtcccgttcacacacgatcctt

SEQ ID NO: 1881 - DNA, 250 bp, Homo sapiens
  misc_feature 192, 194, 195, 196, 198, 201, 207, 226, 234, 235: n = A,T,C or G
gtgggaggaggaagctcgccaagcgcatgaaccttcagaccatggtggacacgctgcaggaggcagcacaggaggctgatgccatccaggaggagatgaatgagaagatcgagcggctcaaggccgagctggtggtgtttaaggggcttatgagtgaccccatgacagacctggacacaaaaaaaaaaaggncnnngnggncaattnagcttggacttaaccaggntgaacttnntcaaaagggggggaa

SEQ ID NO: 1882 - DNA, 165 bp, Homo sapiens
  misc_feature 9, 11, 13, 27, 55, 56, 58, 62, 69, 70: n = A,T,C or G
ttgttgcgnanangacaccaacatggnatacgaacccaacggtggggagaagacnnanctgntcagaannccccaggagtaaaatgcagcctgtattacccttcctggagtgtatcctacttggagtcttcttgttctgggaggcaataaatttctttgttattt

SEQ ID NO: 1883 - DNA, 397 bp, Homo sapiens
  misc_feature 31, 32, 38, 43, 47, 48, 55, 60, 62, 112, 119, 356: n = A,T,C or G
ctcctgcgtttctgcagagctcctgcattanntcaganctgcnatgnnatctggnctgantngtgtctctccaaattcatatgttgaatacttaacctgccatgcgattgtnattgganataattcctttagggaagcaatgaaggttaaatgaggtcataggtgggagcttaatccaatgggactggggtccctacaagaagaggaagacaccagagctctctgtctccacacacagagaaaagaggctgtatgaggacacaagagaaggtaatagctgtctacaaaccaagaagagaagcctctccagaaaatgaaccctgctggaacttggtcttggactttccagcctccanaactgggagaaaataaagttcaaaataaagttctgttgtgt

SEQ ID NO: 1884 - DNA, 232 bp, Homo sapiens
  misc_feature 209: n = A,T,C or G
gcgtttccacactgtcttactgtccggaaagagcaaacacggtggaaagggacagaagagccagaattccgtctagtttgatcactgatttgctgggtgacctggtgcatttcacttcgcctcagtctctttatctgtaatatgagaatgcgcagatttgcctcctaagtgtgatgtgagaattaggtgagagttggcaggcactaaanaaaaaagcatgcattaatccttt

SEQ ID NO: 1885 - DNA, 167 bp, Homo sapiens
gtaaggaaacatgaacctggagagataaagtgacttctcccaagattaagtggtctctaaaaggcagtgccaggactcagacttctgacttgaaatcagagtttcttttcatcatcacatccttcctttctaatctgttgttaataaaactcttggttttctaggtc

SEQ ID NO: 1886 - DNA, 187 bp, Homo sapiens
gtcaccagtggctaagcaagacccacaggatgctgccaacaggtctgaaggcttggtacacagtagggagaaaacagagaaggtgaaaggaagatgggcaaaaagaagagtgttaagagagaaagaagaagtatttgagatcctgccactgcactccagtctgggcaacagaacaagatgctgccag

SEQ ID NO: 1887 - DNA, 282 bp, Homo sapiens
gtttaaggaggcacaaatccaggtgttcccacattaccaaattactactctgtagtttgaaaggaatgacaatgacatcctgtttctggtcatggctaatttagtatacactgcacctgtaaaactccaggccatcaacatttcaggaaggctatgtaatcaaagtggtgacacttactactgagaattattggtgacttccagagtacagcacaagccctctctccacctgactttcaattacaacagagggtcagaagagtccaataaaggcagaacctg

SEQ ID NO: 1888 - DNA, 146 bp, Homo sapiens
caacatggagacaatgttttcctgcattcttcattccagaagctgatggaggaaaggccctatgagctgtgggctggctctataggccccactgtactttagggaattccagtagcaaaggaataaaatcattttagtcactatgc

SEQ ID NO: 1889 - DNA, 190 bp, Homo sapiens
tgtcaaggtcaaggtgttgaacgtctttcgagtcacgagtaaccagttatattggctatttcagaatgctttacagccaaaaagtccttgaacgaaggaagaagtccactaagtctcatcagcaagggtccagctcctcttcatctgcatgttttgaacaataaaaatgactaccactttctgagaacct

SEQ ID NO: 1890 - DNA, 303 bp, Homo sapiens
atggaaatcagcttccagtgtgaaccactctatggacagactcaaatggaaaagaactgatggagaccctcagctcacgactggcaaggaattgacatcctcagttcaaaaacctgtgaagagctggatcctgccaacaaccacgtgactgagcttggaagaaaatccttcctcaaatgaaccttaagatacctgaaaccccagtggaatccttgattgcttaattgtaagagactatgagcaggaatatccaacctaagtgaaaacacaggaactgtaagataataaatgtgtgttttaagt

SEQ ID NO: 1891 - DNA, 117 bp, Homo sapiens
gtggctgtgatcttgaaggcaaagacttggctttatagcacccagcctatcagccatcagtcaaaaaaatggaccaagtgttgagtcaattaacttttcttaaattctcttgaccag

SEQ ID NO: 1892 - DNA, 244 bp, Homo sapiens
gcagagaacacatcatccccctggaacgtgagtcatttgtgaaatgcttgttttaaattcaaacttcttcacaacctgacgagtgtgtgggagacccaaggaagctgacatacaagggcagatttatttttctgccagaaggaaccatcaacacaaaggccaatggtaaccctaaaaatggaaatgtgctaaccctttttattgtcaagcaaataaaaaaattattcttcaaaggaggagaaac

SEQ ID NO: 1893 - DNA, 168 bp, Homo sapiens
  misc_feature 5: n = A,T,C or G
taaanttgaaagtagctgatatgggaccacagaatattggccaatcagtgttttacataatgtctgtggagtggccatgtgctctagaagagtgagacaaccttggcataaccttctttaagagccaatcacataacactgtgaatatttataaaattttagaccatt

SEQ ID NO: 1894 - DNA, 477 bp, Homo sapiens
  misc_feature 24, 27, 34, 40, 41, 48, 50, 53, 56, 59, 61, 67, 69, 74, 76,77, 81, 85, 131, 247, 329: n = A,T,C or G
gcgtctggggagctcctgcgattntgnggagctnctgcannaaggctnantgnaanatntntgctgnantattngnnatcnacantgaccatctccaggtttctacattggaatccaacttcacaagaatncacttgacccactatactggaggaaacttccctgcatggctagcctgggatgctgtgggtcacaagcccctccctagaagttctcctgagtatctaactgcagtccctcacactgnaacttcttccacgctgctgctttgtagtctctcttttaaccttacacatcaagaagtccttctgagtatccctgcaatgtangatgaagcaatccactacccactcctgcactgctctgctcagaaccagcaccctccctcacccccactcccatccatgccaagaatgctgcacttcttccccgtgagccagggtcagcccgaggagaggggcacaagcacagggcctc

SEQ ID NO: 1895 - DNA, 261 bp, Homo sapiens
  misc_feature 43, 49, 66, 67, 77, 79, 83, 107, 161, 162, 167, 226, 232,241: n = A,T,C or G
atgaaatctcagtacagacgcacttttttgttaaatacactancaaggnagttagtgtattttgcnnagaaaatgcnanatgnttggaatatcttcaacattctcanatgtgggctctaaatccaacaataattatccttataagagacagaagaggcacnnatacnaaagagaaggccacgtgaagggagtgtggccctgctgacatcttgatttcggactttancccttnggaacttanataaacctctgtaagctacc

SEQ ID NO: 1896 - DNA, 139 bp, Homo sapiens
atgaggaaactaaggctcagaaagatgctttgcccaacatcagctcatcagtactgttaacttgatgttctactcttggaagctttcatctggtagcaccatgaaactgaagaataaatacaagttagtgcatttattt

SEQ ID NO: 1897 - DNA, 415 bp, Homo sapiens
actcatttgttctagattcagatcattcaacaaaacatggcatgatttccacagtctctgacattctgattgcattgcttgagaaaattctcagtctgggaatctccttaaaatgcagcacagatgatggctgaataggaacagctccggtctgcagctcccagcgagatcaacgcagaaggcgggtgatttctgcatttccaactgagaacaacgaagaaaaaatttcttttaaagaaaggccaaagaattattatagatcttttctttcgacattcctaaacaagaacaggcctagatggtgtcattttcaattcttgtcctaactggtcagtgaccaaaacctctaaaaattcacaaagaagctcatgaggaggtccgaggctgccaaaaggcatttggtctctggcccaag

SEQ ID NO: 1898 - DNA, 360 bp, Homo sapiens
ttctcccagaaagcctacatgaatgagccactttatcacttctcttaaccatggaagtaaagtctaagagatgaggaaataacacttctggaatgaagccatgcaatccctggaaaggaacttagcatcaactcgggcagtgacccactgtgaccctgttggttggccataccaacacctgccgggcaaaaccccatgcctgaggacttctctgggctttgctactaccaaacctttaatgccgggtctaagatgaatgaaaatggttttctatgaagaccagtatataaggacagagcaagattcctcatcttcaaatatttattatttccttcttctggtattagcaaatttggcttt

SEQ ID NO: 1899 - DNA, 433 bp, Homo sapiens
  misc_feature 416: n = A,T,C or G
gacctgcctcttctggacatttcgtataaatggaatcgtgtaatatgtggcctttcgagctgggcttccttcactcaacgtcatgtttccaagatccatccccattgaagctggtgtcggagcctcactgctttctgcgggtgggctggacctggtgacttgcttctacctgatagaatacagcaagagtgatgagatgtcacttccgagattaggttggacggatggtgacttccagcttgttagtcttctctcgggctcttcttgtttgcttgctctggtgaagccagccaccatgtgggttcctggcatagagtttctaaaaccactggaatttcctaagtaaaaggggtgagagaagtgtcttttgttactcataataagcccccttcaaccatacttgagtttattctaanaggcctagttgacctct

SEQ ID NO: 1900 - DNA, 385 bp, Homo sapiens
  misc_feature 37, 216, 285, 308, 311, 361: n = A,T,C or G
atcctgactgcaagcttagtcaactgtattcctggcncctacgtaacaatggcttgcacataatatgctcaaatgcatgtcaaaatgaatgaaagatctgcagcacacaaggctatgcctatgtactggaccagaggcagaatatatatgtagcagtttccaagagcctatcaaggacgtcagggactcgctgacacttcttcccaaaccagcagnctgggaaccatggatatccatcaagaaggggaaaggtagcacttaaaaccccaacatttaaatcttaanagcactgggaagtgggacagatnccncccacctttttttcaaaggaacggaagggcctaccttcagccaaaacaangtaaggttttttggtttggaaaat

SEQ ID NO: 1901 - DNA, 416 bp, Homo sapiens
atctccagcaggtagaaaggatttgtttcttgaccatgcaaagtctgagtcagactgccaggtctcctaggctgctgccctccatacggtgactcagcaattcagcctgcgtctgtctcaacacaaggcttccagaatctccaccgtggcacagaatgagagctggggagtcctgcaagggctcttcatggcctcagcctggaagtgattctcctcactcacactcagagcacattggccagaatgagtcccaggccctcatctaactgcaagggggctgggaaaagcagttttcttgggtaactgggaaggaaaggcgagtacacatggatgagcgctagaagtctctaccatagcagctggacaaacaacggtggaggagcattccaggcagaaggaacggaaaaggtgaagac

SEQ ID NO: 1902 - DNA, 256 bp, Homo sapiens
ctagaatctttacttatgtaactgaaaattcaatgaaatgaattagagccaatggacagtgaagatcattgttctcagagaagttcttcatgttatggatccgtgactccttaatacattttcctacttttgaagaaattgaactgaatttattctatttatataacaggaaagatgccaaactgtggatctgcttattcaaagtgactgaattttgtcaggctatttatcaacaaataaagtatttgtaattatg

SEQ ID NO: 1903 - DNA, 558 bp, Homo sapiens
  misc_feature 16, 18, 19, 20, 41, 44, 46, 54, 56, 61, 73, 81, 83, 93, 96,98, 108, 110, 112, 115, 120, 122, 143, 149, 158, 162, 233,242, 252, 262, 276, 296, 376, 383, 400, 403, 452, 457, 469,494, 543: n = A,T,C or G
gtttcttgtgttttantnnncaaaactgtaggaatatacanaantntgggttgngngtcanacattttcaaanggggcatntnaaaaaattcncgngnggacccccancncnccncagtntntcccccccccaaaggggcaanccaccngtacccaanaccnttggcacttttggtcttttgggaagtccccggtttaccttcttggcaagttttattcctttggggattttncccaggaanaacttacccncggaattctnaaaaaccggtgccncttgaattggttcccaccancattttttcatttaagtagccccaaaacaaccccagaattaaatgggaccaaaatcttatggtgggggcattataccccncaccatnggatgaatttacttcanccntttaaagaagggaaatggaggggcccttgctacatttcttttcaacatnggatngggattaaaccnttggaaaaccttggatgcttaagtnaaaaagaagggcaggtccccaaaagacttcatttgggatgaaagcattnccagaacaagggcca

SEQ ID NO: 1904 - DNA, 419 bp, Homo sapiens
ctctactagagaccataataatgcagtgaatttaattatttcatagagatgaaataactatcttcagggatatagaaaatgtaccctcctcatcctgacaaaattttgcagatctctggagggctatacaagaagaaatttcagagaaaccctaaacaaactccacagctctttgcaatgccaggaagaatttttaccattatataaatgttaggtttaatttaatcattcacataatgcctactgatgcattctcttgcatagcatgtgatgtgaaatttgtgatttgccactattgtattaaaaaataagcattaattacacactaaaattaagccatttgaatcttggaggaggcaaaagccaaagaaaatgtgcagctggtcaggaagtaaatccagggtggagaaatttttgtc

SEQ ID NO: 1905 - DNA, 447 bp, Homo sapiens
  misc_feature 14, 16, 73, 290, 296, 299, 313, 359, 394, 398, 401, 434: n = A,T,C or G
actttgagcttcanancactgggatgctgcaaaagccctgctcattaaatcggaccggctagacatggaacangcctgcagaactttggagagtatggtttggactattcctgcactcagcgatacgggacaagcacagaatgcaataatatttaagtttgttcaaaaagccaaatgcttttgcaaaatactcttttttatttaataggaaatagagattgcttatggaagagtgggatgggaacctgtggaaagacatcttaaatccaacccctggcagtctgacatanggctgntgncaaatccccatagncacactcccaatcacaatgcttcttagatcccctaacccaccgcancctaaggcctacaaagacagctcaatggctgggcncggnggnttacgcctgtaatcccacactttgggaaggccnaggcgggccggat

SEQ ID NO: 1906 - DNA, 167 bp, Homo sapiens
  misc_feature 24, 28, 38, 45, 63, 123: n = A,T,C or G
agtctgggactcctgcattaagtnatanctgatacggncggacangtagggatcgtctattgnatgtgaaaccagagatgcccgccaacctggaatagagaggaagagagcaggcagatttgnacctatctgctttcaagctggtcatcatgatgaaacttagacac

SEQ ID NO: 1907 - DNA, 255 bp, Homo sapiens
ggttgcagaaaaggaagaagaatcagcagagagcatttgtggccagcaaagcttaaaatatttcctaaccgatcctttgcaagaaaagttcacccactcctgtagtcagcagctcccctactgtgcgcagtcagtgtgccatctcagactagcaaagatttgtgcttggatcatctacacttccctgaatgctgaagaagatatgctatccatgcaatccttgtcgactgcttgattaaaaagtggataaactgt

SEQ ID NO: 1908 - DNA, 111 bp, Homo sapiens
  misc_feature 2: n = A,T,C or G
angtacagtacaaaatgatctacaactattgagtggaccaactgaaatcatttgtcaatcctctttgcaaatgaacttgtgcaatgtattaaaacatttttaaaagttcat

SEQ ID NO: 1909 - DNA, 561 bp, Homo sapiens
  misc_feature 3, 4, 7, 9, 23, 86, 88, 93, 105, 234, 450, 480: n = A,T,C or G
ganntgntnttgcattacctcanaagctagtcacaggagaacaatgatttgctctggcaaggcgaagacagtaccaagtcattgcntnatctncactcacattcngagttcctgagcagctgctctggaggtggattaaaataacccatcatttcagtttttataacccattcagcatttaggaataacatggatggttgaacccatggatacagagggccaactgcacatacnatgaatgcttgaagtgcactgatcttcagtgaacagctcactgactctttacaggtctcaaactcgtgagctcaagcgatccgccacctcagactccaaagtgctgaaattataggcatgagccaccatgcctggtcagcattggggagtttcaagaactattccagcaaaggaggggaacttcaccaccgctgcatgtctaccttggaaagtcangcagcattgcttctgctgggttctctttgntacaaatattgaaaatttgctacctgcacctgctgtgttcccaccctctggagacctgggaacctggctgcacctgggaag

SEQ ID NO: 1910 - DNA, 569 bp, Homo sapiens
  misc_feature 476, 545, 551: n = A,T,C or G
atgaggaactgaggcatagtagtaaaacaacacacctgatgtcacccagcttcgcggacagtgggagagccagcgccccccagctccagtcaggtctcactccctgcaacacgagcaaatggacatggccatgggggcgaggactggggggcctgccgaggagctggagccatggggtccccagaagtagaggcctagaggcagcaccggtacccactgcacctcagggctgctcggtgaccgctctcagggcagccctgggctgttctcaagatcaacttcaccctcaggagactaagttatgcccagctgaggatgttcacaaggacacactgcaggccctagaggcaatacccctggagaggctccaggcccacggaggacgtggcggccggtgagcaatccaaggccctgggcccaaggtggactggggtttgcccttccacctgggacattccaagttcacgttttctcangtctcatttaacaaggaaaaaatagtacacacaagcactcacgtccacaaacaacttcttttcttcctnaaaaanggaaaaccacctgggcca

SEQ ID NO: 1911 - DNA, 433 bp, Homo sapiens
  misc_feature 11, 12, 18, 20, 21, 37, 43, 55, 142, 199, 216, 332: n = A,T,C or G
cctatctgtgnngtgtgntnnatgcactggggccaancacttnttcggatgctgntacaacaataatgaagttaccatattgctccagacaagagatgctcatggcctcatggcctgaattaagcagttgcaactgaaatantaaaaagtggccatggttgagatacattttaaagatcgaatctacagaatataacanaggattaggtgctgtangaaatgagaaaagactgatggccagttttggattcagcagtggctataatcattgtgctacttcttgggggaagattggtagagatatgggataggagggaaaatcaaagaagttnccattttaaaccccgttaaagtttgagacaccaataagatatacaagttccaaaggtcaattaccagttttggatatgtgaattcaaaaaagtatgagctg

SEQ ID NO: 1912 - DNA, 265 bp, Homo sapiens
atttttgttcagattgaacccaagaggactcgtgactcatggctcaactggtcctatggctccacccaacagcaagttctgcacacccctatgattgcttccccaacgaatcagcagcagttattccctagccccctgcccatcaaattgtccagaaaaaccctaagccccaagccttcagggagactgatttgagtagtaactccatctcccgcatggcatagctggacttggattaattaaactctttctttattgtcgtgcc

SEQ ID NO: 1913 - DNA, 501 bp, Homo sapiens
  misc_feature 5, 15, 16, 21, 29, 31, 36, 37, 44, 50, 112, 169: n = A,T,C or G
gtaangctgatctgnngatgnttgtggcngntgttnnaccctantgcacnctgatttgtgcctcctccttgtccccacgtcaagagagagcagcgggacgagtggacccttnggaatcctacctggggcttcccttccaggtggaagggaagtaggagccaagatgcanactccctgaccgcaggcgctgggccagccacaatgccatcttgcccctaccctggtttatgattgtttttcacctttgggcccttggccagagaattccctctgcctccaatgtacgccatcccctcctttcctttctgcctgggacactcctgcctatgtgcatgggccaggtctggcctgctgccattactatgtggccatgagctaagaatggttttatgtttttaaatggctggaaaaaacatcaaaggaagaattctattttgggcatgtgaaaattatctgaaattcaaatatcaagtatccacaaataaaattaaattggaacat

SEQ ID NO: 1914 - DNA, 324 bp, Homo sapiens
tctccatgtggtctgacatctccagcaagatttggcacactgtggatggagcaaacctgcctctggaatcaaatcattatgccgaggcatccaggctgagggtaacccaggatgaaatgtttcccaagatcactgggaccttcctacccacatgaggtcatcaactgagactggctttctccagaccagacttggaggttgatgctatcttcacaagtgtgcaaaagtcaataagagttttgtgtaactttgctcaggatactttgaaaaattgtttaattttttatttctggttatgcatattttcaactattaaaaccatgc

SEQ ID NO: 1915 - DNA, 433 bp, Homo sapiens
  misc_feature 19, 25, 38, 45, 379, 395, 403: n = A,T,C or G
agtctgggagctcctgctnagactnctgcattaagtcnaactgangttgagaaggattgcagcaatgcaatgggcacaccagcaggctcttgaaggcactgccatactgcacagcttccacaggcctggagcctgaatcctctgagacacatcgtccctgaaattgaaagattggcacttcacccacacctgagacgggaaacatcatctcttcctaggaggacctgtgtgaccccgcctgcatgaaaggtttgctcactcggtctgcagtggcaggcccacactcggcattccccggagtcctccagtgcctgcgtgcactttctcttcttggttggaggcaatgaggctctaaaatcaaagacaccaaaacgaaggntaggattcttccttgngtccatgntatgttaaataaaaattaatcttccaagcc

SEQ ID NO: 1916 - DNA, 449 bp, Homo sapiens
  misc_feature 2, 7, 10, 16, 17, 20, 34, 36, 44, 51, 56, 79, 90, 93, 157,171, 185, 211, 216, 223, 224, 231: n = A,T,C or G
tngctgncgntgccanngangctctatggaatgngnccctgccngtgtcanccccnagttccaacctccaaagcacggntggagagcagnggngcaatctcggctcaatgcaacctccgtctctccctggttcaagtgattctcctgcctcagcctnccgagaagctgggntaacagcgcccccnttttacagatgataccattgaggctnatcanttaaatnncctggcnaaggccacactgtggaactgggattccaatcaggtctaactccaatgcaatactccttccattatactttctttaacctgccatactaacatagcacatagcctgcgacagtttaaaaaaaaaaatcctggcccccttaaaataagtgattcattatttttttaaattataaactgctactgccaaatagaaaagtaaagtcgtttcattaaaaatgg

SEQ ID NO: 1917 - DNA, 308 bp, Homo sapiens
atattgaactgaaaccaccattgagtcaattcctgtggagcctctgcctgaaaatgagataaaagtcaagatgttgaaaacgaaattttaaagggccttgtcgaagtcatcggcagtgaagaatgagatgttaaaatcagatgtgatatgcatggggacaggagccattcaaaggccggtttcatcactgaacagctagacctccgttctggttggccaacctcaggagctgatggatacaggttggaaccaagcccaggggtcctccggaagaatctaaaacaggcaaaataaaatgtcttccaaac

SEQ ID NO: 1918 - DNA, 327 bp, Homo sapiens
tcttccctataggataatgggagtttaaagatgatcagaagacagttgggagcagagtgagaataagaaccctcaactgctgtctcacctttcagatcacgaagaaagttttttacaatgagcagaacactcaacctgaaagcagaatggattgagtcactgcagccgtggcagtggaatggtgtttgatgttggcaaaggaaacatgtacttctagactggacagttttcccttagtttacagtttccaaatagagacatcactttgaaataacatggagaacatacatggatgtactgaacgaagaataaagtctgtgttgcaag

SEQ ID NO: 1919 - DNA, 284 bp, Homo sapiens
cagaggaagaggagcgactgaagaagaaagagggtggaggtgaagatgtggagctcatattgaatctttggaaaagtgaaaatggcttttagtatccagtaagaagagtaaatagaagaattttagccacaaatggaaaagaaaacgtctcttcctcagctcaaagagacaagctcttgtcagttcctgtaaaatttaatgctggtgggcctggaagcacatttctcagacaccctagcaaataggaatgaccaagtaatattattttgccaataaaaatatgc

SEQ ID NO: 1920 - DNA, 464 bp, Homo sapiens
  misc_feature 31, 33, 76, 86, 132, 165, 186, 280: n = A,T,C or G
gtatattacgttcttatatgaatgacagacnanacatggaatttgaaggaaaggaagatgaccgttaaggtggtanggcctttgancccaagctaagccatcatatcccctgtgatcttgcacctacacatncagaatggcctgaagtaaggtgaagatccacanaagaagtgaaaatagccttanctgatggcattccaccattgtgatttgcttctgcctcaccctaactgatcaatgtactttgaaatctcccgcacccttaagaaggttctttgtnattctccccacccttgagaatgtactttgtgagatccaccctctgcccgcaaaacattgctcttaactccaccgcctatcccaaaaactataagagctaatgataatccccaccctttgctgactcctttttcggactcagcccacctgcacccgggtgaaataaacagccttgctggtcacac

SEQ ID NO: 1921 - DNA, 317 bp, Homo sapiens
  misc_feature 28, 39, 55, 59, 61, 69, 71, 72, 83, 95, 195: n = A,T,C or G
ggctctttctcacttggatgggtcccanaaaggcaactngcatgttaccaaatgncctngnaaaaagancnngtaaggaggancggaggaaggcntttaattgacagccttcgaggaactgaatcctgttggtgaccatgtgagggagcttggactccggtccccctgtgttgagccttcagatgaattggcagnccccagcttggtggcatgactgtaacgtcctgaaacaccttcagcccagaaagcattcagctaaaccacacctgtatttctgacccaaagaaattgtgagataataaacatttcttctctcg

SEQ ID NO: 1922 - DNA, 259 bp, Homo sapiens
  misc_feature 29, 38, 41, 42, 49, 50, 51, 52, 53, 56, 59, 60, 62, 63, 64,66, 68, 69, 72, 81, 89, 92: n = A,T,C or G
agaaagagaaaatactccaaatcagaagntaatggccnccnngctttcnnnnngcnttnncnnntnannatngaaccaccntcttaaanttntgggaggataaagcatcaggttaaaagctcacctggatttgcgtgcctgagcagaaagacagaagaggcctgggacccaactagcatcatactactgcttcatcagcctagatgactgcctaccttcctatctttcttacaagacaaaataaactccgtatttgttt

SEQ ID NO: 1923 - DNA, 403 bp, Homo sapiens
  misc_feature 33, 44, 45, 52, 60, 61, 72, 76, 79, 92, 212, 327, 342, 344,353, 356, 359, 367, 369, 376, 383: n = A,T,C or G
ggaattgaacagcttggacttggagaccggtgngggttaaaccnnaattagnagggcggnngaaaaggactnccanatngaattgtgttggntattcatatcccccagcacctcaaaatgtggccatggaggatggagacagagattggagtgatgcatcttcaagcctaggaacactaaggattgctggtaatcaccagaagctggaagangcaagaaagtgtcctttctagagccttcagagagagcgcagccctgccaacaccttgattatatgcttcaagcttctagaattgtgagagaataaatttctgttgttataagccnaaaaaaaaaaaggcngncgggggccnttnagntgggactnanccaggcngaacttnttcaaaaggggggggggccc

SEQ ID NO: 1924 - DNA, 376 bp, Homo sapiens
gggttcagaaaatgctaccccaaagtactttgaactgaaggtgattgggagggcctaagaagcaagaaggtcactctgagttcctcctgcctttcaatgtgagacctgccaaaagggaattctctgtcctacctcaactgaaagtagcttgtaagaacttcatctcaaaggggtactgcattatactctgaggccaagaaaagtcaacgcagaggccttcctgggtccctctcccccaatttgttaccatacccttttgtcccatcatacttctacatgattttactgaatctaagcacaaaaatactcagttgtcccctgggtgttgggcctcatttctaatgggtttcgttccccataaaactttggttaatgc

SEQ ID NO: 1925 - DNA, 394 bp, Homo sapiens
  misc_feature 12, 16, 28, 31, 43, 46, 73, 88, 102, 116, 125, 197, 273,292, 298, 309, 311, 330, 343: n = A,T,C or G
gcttcgcatgtnttanaggtcctacacncanattcacctactncangggattcaagtccgtcttatgttctgntaatgacaactcttnttgaagttcttcanggccgtgtgaaaangaaaagccngccgggcacagtggctcacgcctgtaatcccagcactttgggaggctgaggcggcggatcacctgatgtcangagtgcgagaccagcctggccaatgtgtctgtactaaaaatacaaaaatcagccgggcgtggtggcgcatgcctgnaatcccagctactcacgancctgangcaggaggatngnttgaacctgggaggcggancttgcattgagcntgggtcacactactgcaccccagcctgagagaaagagcaagacttccgtct

SEQ ID NO: 1926 - DNA, 343 bp, Homo sapiens
atggaacccccggcatctgctcctagtagaggccagtctgggcctgacctggcattccaccctgcagatagcgagaactgctgcagcagccgccctagaccattctgcagttctgatgcacagcatgatggaagcatattgcagaagattattctggcttttgtagatagtggattaaattgggacagtgtaagaatgggaattcagatagcccatggatggacttcaaaatatcaccctctaaaattggactcaaatttcatgttcagatgcccgttttccccactgcaagaggaatccaactttcatcagatccttgcatcaattaaactttccttactgc

SEQ ID NO: 1927 - DNA, 373 bp, Homo sapiens
  misc_feature 26, 27, 37, 41, 42, 43, 49, 51, 52, 55, 59, 65, 72, 82, 83,90, 96, 110, 114, 119, 150, 155: n = A,T,C or G
ctcctgcttaagtcgaactgaggggnntcaaatagcnatannntccctngnnacnggcngccacntccaaanggccggttcnngccttantgatgncatttccccaaaanaagngaaantggcctgttcctgccttactgatgacatggncttgngaaattccttctcctggctcatcctggctcaaaagctcccctactgagcaccctgtgacccccactctgcccgccagagaacaacccccctttgactgtaattttcctttacctacccgaatcctataaaacgggcccacccctatctccctttgctgactctcttttcggactcagcccacctgcattcaggtgaaataaacagctttattgctcac

SEQ ID NO: 1928 - DNA, 386 bp, Homo sapiens
gtaaaattgacttgaagtccactcagcgtcactgtatgtctaaaaataaagaagcttggaaagcctggatggaaccctgagagacaggctagtccctcaagcagttgctaaagagttgagcggtttcttctgaagttcaagataacactaccgaagaatgttatcaccgcctcgttctacaattcgctcaagtgaatcctgctaaatctttgctcttctcacgagtcagacctactgctattagtggaaactacttatgaaatgaattttatttctaaatttctaatcatcttgcaatgcaatattaggcattgtcctctcggtccgctaacctgatcaaactggggtccctaaatccaaacacgcacatacagcgtgtcttctaa

SEQ ID NO: 1929 - DNA, 267 bp, Homo sapiens
  misc_feature 39, 228: n = A,T,C or G
gaaattattgtaactctggaattttagaaggtgactgcntgacaattctgagaggccaatgccaatgagagaaaagtttactgctactcatgatggcgcccctggaagcagaagacacagcacgctatagagggccatgtgggaaagcactggagtagctccaggccgggcttgccagtctctctgcactctggaaggagtttgcctgggttggggttgcccttgtanattccaaaccttcattttgtcaatttacttaaaggtgac

SEQ ID NO: 1930 - DNA, 243 bp, Homo sapiens
  misc_feature 67, 196, 200, 204, 205, 207, 220, 224, 227: n = A,T,C or G
ataagggcctcgctctgttacccaggctggagtgctgtggtgtgtttgtgactcaccgtagccttgnactcctgggctcaagcaatcctcccacctaagcctctggagtagctgggactacaggtgagcaccgccaagcctgacctcaagttgaaatgtgatcaccaatgttggagtggggcttaatgggtggtgnttangctnngnatgaaaccattgncacnaanccaatggggatggtct

SEQ ID NO: 1931 - DNA, 307 bp, Homo sapiens
agctctagtgccaaatgatgaatcttttctattaactgacccagtcttcaaaaaagaattgctagcctgagaaatgtggaatgcctggcttctctgactagtgttgacacagttgtttccagcgtgaacatacctgtacaagtgaagccatcacctgtgtatccttccttgcacagacagcggtcaagaaaaaaacctgcaacttggatccaatataaacgatgacaaatttcaaagaagtggaagctaaattaatgaaaaatgttatgcaaaatgttttataatatagttaaaatgtatgagtttt

SEQ ID NO: 1932 - DNA, 332 bp, Homo sapiens
gtgacggagtgagagaaaagtcagaaccttctgctcacccaggataaatcatagtactaatgattgcagtggagcaaacttatctgaataccagacagcaagaaagttcctcttctgggagaagagttaccaccaaccaagacaacaacactcagaagactgatttttgaacgattttccaacactcacgtctcaattcctcttttctaaaagtcaacaaaatcctggagcatatcgccagttttccttacaattgatgtacatgtttgctactaatttctatggactcccttaagtcctataaattgtctaccaaatcttcaaaaaaagcc

SEQ ID NO: 1933 - DNA, 392 bp, Homo sapiens
gtggcagttgctggagtaccagggcaccaagtggaggatgtggtagacagcctctaagatgcgccccctgccaatgatctctgcctccagggaggagctagaaggcagagagaaagccactcaggacttcccatcccagaagataaaggtgaggaaagcagcagcagcagccacaggccagtattccagagcagctttgggttcctgtcaagacctgctttgagaaggaggtggctgtggggctggagggctgggcctgttcctgagctggctgctggcaccacagcaatgaggcaacattgagaactgcgacacgaggcccagtcctgctactaaaccaactgtgtggacttgcatagtcacttcacccctcgggcctccatttctccact

SEQ ID NO: 1934 - DNA, 351 bp, Homo sapiens
  misc_feature 1, 4, 8, 24, 29, 33, 34, 38, 46, 51, 52, 56, 57, 66, 76,80, 86, 110, 120, 133, 137, 152, 166, 170: n = A,T,C or G
ngangggntcttgctatgttgttnatgcnggtnncacnctcctggnctganntgannctcccaccnaatgctacanaagngctggngttacttacctaaacctacaatgngaagagaatntgacactatgatnccanctggaaaaccaccancacccaacatgcgngctnccaatctctcgaatcgtcactgtgcctccgaacaccacttagttccctcaaatatgtccttctaacaagcaggcgtgctttcgtgtatttagaacaaatcttaaatgtacacatgcatccaaatcttaaaattcagaataaagaaaagcagagaaggacagaagaaagactaatgctaccg

SEQ ID NO: 1935 - DNA, 396 bp, Homo sapiens
  misc_feature 13, 31, 62, 85, 89, 103, 151, 160, 167, 202, 203, 217, 221,244: n = A,T,C or G
ctatgcatggaangagtgaagaggatgctgntggcagagaactcatcggcagcagcccccanaggataatgtacaaggcacgttntgtncagggagtctgccngcctggccaagagcacccccaaaagcacttggaatgagcccagctacnccaagggtnggagatntgccaatatcatggagggagaaatacacatctagnntatgacccagcatnccanaggcctgcaggctaacccgcctncctggaagaaaacagaaagtagagggcctgtcactgctggagatacccacgatggagacaatgcttcagcagtgagcccaggtgtcgccatgcaatggcatgagagctctgcctttgtccatcgacatggaagtgaaataaaaagaaaactt

SEQ ID NO: 1936 - DNA, 350 bp, Homo sapiens
gaaccaagagaagcttctcaagggtcagattattccagctacctcttggatgcccccgaggcctctctacaaactgagtgctgactgtgaccctccatgatggggaagaaaggatcataccctttccacccttacactttctaggcaaaatacacagtaatcatcaaggaatttggttaggccctcatctgactggttccctatttcctggatcccatatctgattctttctctgtttattcccctattttggaagaccacatcctttctaaaacagtgtgcatcagaagggaagtgttttctacattctgcatcctaaaaataaatgtctctattctaccatgtgactg

SEQ ID NO: 1937 - DNA, 374 bp, Homo sapiens
  misc_feature 2, 7, 17, 19, 56, 58, 60, 71, 84, 85, 89, 91, 102, 119, 135,144, 161, 197, 230, 249, 269, 273, 318, 322, 340, 354, 355: n = A,T,C or G
cntgcanagggggcttncnttattccttcttcccgaaagaaggaggaaagaagggnancncccacgaaagnaaaacgccttggnngccnancccccaatttncttactttcatgggganggggaaaatgcccaanggatgcttntaaaaatcaccaccggnctttaaaccattgccccaaaaccgggtaagttttgnggtgttgggcttgggtccacttgtccctctggncaacctaacaagggagggnaagaaaccaagggcttaccnaaanggatgtttctttcctgaggggaaaccactcctatagactcctctngaantccaggaaggaagtgggnaaaacccatcttcnnttaatcacatttttgggat

SEQ ID NO: 1938 - DNA, 153 bp, Homo sapiens
gtgaggcagccatattgtgaccatgagggaaagaccatgagaactgaagggaaatggactcagaacccagatattgtaaggctcctggagaaaccctggaaacatctacttctcaacgttttcgcttgtgagctaatgaaacaccctatggtt

SEQ ID NO: 1939 - DNA, 77 bp, Homo sapiens
aaattccaaagaacatggaaaggagaccacaggaagaatccagaactgctgcccatcataaaatttttccatctgcg

SEQ ID NO: 1940 - DNA, 430 bp, Homo sapiens
tttcttggcacgctggctgaagacatgttgcccacaagctgagggaggtccttacccgtggacgccaagctccgggaggctgcagtggcggcagctgagtctgcaggtggagaggtgcagggactgttttgcctccacctccttcaatacctacttttctttccagcaacagtcccttcccttacgctcccgaatccaccctggccctgaggctgcacctgagtaccacatcctgaccccacttgtttgcaagacgtctgcatgtccacaagtgcagcgttcatctcatctcaacaagcgatccctccggagcagacgggtgatccctaccaccttctgaacactcctactcatcatctcggtaacaccctctacctgttccatacctaggccagaggttttcaccccggccacacgtcagtaccactta

SEQ ID NO: 1941 - DNA, 337 bp, Homo sapiens
aagaggaatcaattctggaccagaggatgtctccctgcctttgccctgcctgcctccccccacatccttctctggcaaggggaatgaggctgagaatgacctccatcctcaggacgaggtattaaatattcagcccatgccagagtgaggatctccttttcaccttctgtctgaattgtgccttgaatctgtttcgcgatgggtgcgaactgggtgagacacttgtcttagaaccgcagccctggcaactccacgccgcctgacctcgagccggtttccatagcctgaatccttcctctcatttgcaaacaactttcttagtaaatgatgacaaagc

SEQ ID NO: 1942 - DNA, 266 bp, Homo sapiens
  misc_feature 14, 17, 18, 19, 20, 27, 62, 150: n = A,T,C or G
gttcctcttgtttnctnnnnagcaccngcttaagtcagactgacccgaatgttcctcacaanaggcctacaatgagctattgcagtcaccagatgggactcatgaatgcagcaggtggggcagatggcaaggcgccctgtctgatgctgnctgcctgggcatggactgccttttccttccagaccttttcctggatatggccaagtctgaagtttcaaaatacatgttattctgaacctaataaagaaaacatatatccaaccttt

SEQ ID NO: 1943 - DNA, 443 bp, Homo sapiens
  misc_feature 375, 377, 378, 379, 381, 390, 393, 410, 418: n = A,T,C or G
gggcattcagataaagccatcatatcccctgtgacctgcacgtacacatccagatggccggttcctgccttaactgatgacatttcaccacaaaagaagtgaaaatggcctgttcctgccttaactgatgacatggtcttgtgaaattccttctcctggctctcctggctcaaaagctcccctactgagcaccctgtgacccccactctgcccgccagagaacaacccccctttgactgtaattttcctttacctacccgaatcctataaaacggccccacccctatctccctttgctgactctcttttcggactcagcccacctgcatccaggtgaaataaacagctttattgctcacacaaaaaaaaaaaggncnnngnggccaattnagnttggacttaaccaggcngaacttgntcaaaagggggggggactacccccc

SEQ ID NO: 1944 - DNA, 514 bp, Homo sapiens
  misc_feature 450: n = A,T,C or G
aaagaacattacatggcatttcctactgaagatgggacttagcacaaaaaccgtcatgggttccaccaaagagatcattaatgtctcaaaacgtctccaaggatacatgatctacaaaggaccacagagtgccctgcagaattgggttgaaaaactaaagaaggcaaacagagtttatggtaaggcggcagtctctggtccccgttgtgagattgggttcttcctgcctgttcctggagtggcatggagaaaagagcatggatttgcagaagagacacttgagagagagctgactgtgatggtgatgctcacagggacccttgaagacatgagttaaagatcgtagaagcatgacaagttggatacctgaatgactgtgtggatctgagtttcccagtgccctgcagtacatgatcacattgtttatgagactgactatgtctgagccanaattgattgcatctatttgatgctgcaacttaacctgtgcttaacactatctctggggaaaaaa

SEQ ID NO: 1945 - DNA, 239 bp, Homo sapiens
gacatcttcactgcttccatcccgagaacttcagaatccaatgatccagaccagcccagtgcaatcaacagtgagccaaatcaaaaagcagcctacattctacctgataatctacacacaggctgggatctgctgggttctactaggtgaattgaattgctccatgccagtggaaaattttttcacatcagtttttcctagtagatgtttaaaaaattacaaagaattttccaatcgac

SEQ ID NO: 1946 - DNA, 503 bp, Homo sapiens
acttctatcaaaagacataaaggcagaaccgtgggatcagcaccacacacagctgctttcttcgaacatctgaattatgacttcctgttcctgggatgatgctggggacagccaaaaagttttagagccagattccttatccaatgggcaaggaaggggtggcctgttgaaacatcctgaaatacatcaacccaaaatacgaccaacaaaaatgtggcttccaaaaataactccgccaggcgggtctgtgtgccggctgggaggaaagagaggtgggacagaaccagcttggaccttcccccatcccaggagtggccatcataccagcgtcagtgatcccagcctcatacctttgccttgagactctgcattctgttgcttgttgatggtcactttgttcatataaatgtactcctcatcagagcctgcagaaggaaggagacacaggctttgtgtgacttcctgaagagaaagggcctccactaaaaaccctgttactccaa

SEQ ID NO: 1947 - DNA, 215 bp, Homo sapiens
cactttaaagatgttgtcatccaaaaagccggcatggtggtgcatgcctgtcatcactactactcgggaaactgaggcacaatcgcttgagccctggagttccaagccgtagtgggcaatgattgtgcctaagaatagccactgtgctccagcctggaaaacatagcaagacaaaaaaagaaagagaaagaaagaaaaaaaagaaagaaagaaag

SEQ ID NO: 1948 - DNA, 418 bp, Homo sapiens
  misc_feature 122, 132, 180, 183, 217, 377: n = A,T,C or G
gaaccccagattcttctccatggtcggaatcattgcaaaataactggtttccctaggatcaccagctgtcatggactgatttgtgtctctccaaattcatatgttgaatacttaacctgccntgccaattgntaatgggagataattcctttagggaagcaatgaaggttaaatgaggcnttngtgggagcttaatccaatgggactggggtccctnccagaagaggaagacaccagagctctctgtctccacacacagagaaaagaggctgtatgaggacacaagagaaggtaatagctgtctacaaaccaagaagagaagcctctccagaaaatgaaccctgctggaacttggtcttggactttccagcctccanaactgggagaaaataaagttcaaaataaaagtctgttgtgt

SEQ ID NO: 1949 - DNA, 196 bp, Homo sapiens
gactttgtgctcctgtgatccactaagatatcatgtgctgagtaactgctggttcaaagaaaaagtggattcatgtggagcagacttgaacccagactcaactttacagccaactacagccaacccgcagcttggaacggaggcaggcaagctagtccgtggacccataagtgataaaaacaaatgctttcattat

SEQ ID NO: 1950 - DNA, 137 bp, Homo sapiens
gttatgtaaagaggtgcctgcttctccttcaccttccaccatgatcatcagcttcctgaggcctccccagaagccactatgcttcctgcacagcctgtggaactgtgagccagttaaacctttgttctttattaatt

SEQ ID NO: 1951 - DNA, 430 bp, Homo sapiens
  misc_feature 345, 368, 372, 411, 414: n = A,T,C or G
ctcagccgaatcgtcacttcctctggggaccctgtcctgacccccatgaccgtggctgcctgtggaaggtgctggtaaacatcctgttctttcccctcctggcgctttccgtgcctgtggctcttccccagtctggagtacagtagggtgttcttggctcactgaaacctctacctcctgggtttaagcaattctcctgcctcagccacatggagtattgctctgtggcccaggctggagtacaatggcgcgatcttggttcacagtaacttccgcctcctgggttcaagtgattctcctgcctcagcttcccaattctggaggctggaagtccacgatcaaggngccaagcatggtcagtttcttgncctngcttcataaggccgccccaattttgccatcttcacaaanaanaaggggtactcacgtg

SEQ ID NO: 1952 - DNA, 211 bp, Homo sapiens
ttgagccttcaaccctgtgacactataaataaactgctcctggagctgcggaaattgcccattatctccaagagcatgttctgataagagtccatcaacatgaagccaaaactcattcagagcatcaagagaggaaagtttctagtgatggtttggtcatggtctctttcaggatgattgcatggcagaggaaggaataaaactgtgaaag

SEQ ID NO: 1953 - DNA, 424 bp, Homo sapiens
  misc_feature 363, 378: n = A,T,C or G
agtctcttccacagtgctgagcatgagtggagcttgctaaatcattgctaaatgaagcaatgggctgtaagcatgtcctgtgggatctgcatcttcagatcatcctgaagtactcaacaaccacatcttcttccaggaacagagcccaacataaactggtagggtttgctgtcttagacagctaagagaacgaggagtggagctagtgaacaagcagtgaagggggcagttccttaatgccacccgaactgaatttcaacagtctgacaagctagcgttttgggtaaatatcccagtatacttgtcacagagttaagtaaaatggacttccttcaaaggaagtgcttttaatacaataactgnttttggtttttttanccatgggattaaaaatttacacatttactaaatctggcatatttat

SEQ ID NO: 1954 - DNA, 190 bp, Homo sapiens
gcaactaagacaatcatggggatcacactgtgttccttccagaaatccagaaagcctcagccaagctggtactggcaaagacaatgataattctcgtgagaaaggtaatcttggtgtggtgaagagggtttgcatggaatcagaagaatgggcaaaggttcctctgcaagatattggaaagaagacgaag

SEQ ID NO: 1955 - DNA, 370 bp, Homo sapiens
  misc_feature 16, 17, 51, 130, 132, 323, 325: n = A,T,C or G
tgcctgagaataaccnnaacgtgctggagtacatcatgttctggttagatnacgggggactaaccagaacagactgactctgtccgaatcacccctggagacaggaaattcttcaacactttagcccggnangtcatgctctccagggtataaaacccaaggccagcttcgggcacttgaagacaaggactccatccacccaggcaactttcccgagcctcatgggagcaactcctcatgaatcccaggcttctgttgcttttgctgcctatctataagaaataaatccacttcatttaacctgcaaaaaaaaaaaggcccgngnggccaattcagcttggacttaaccaggcttgaactttggttaaaa

SEQ ID NO: 1956 - DNA, 161 bp, Homo sapiens
cccacattgtgaggaagattttacaaccttccctttacagatgagaaggctaagcaagagaggttacataatgctcctgaagttccacggctgttacttcacactctattgcttcttaaaccaggatgcattttataataaataagtatatttggtgtgat

SEQ ID NO: 1957 - DNA, 425 bp, Homo sapiens
  misc_feature 388, 394: n = A,T,C or G
gggcattcagataagccatcatatcccctgtgacctgcacgtacacatccagatggccggttcctgccttaactgatgacatttcaccacaaaagaagtgaaaatggcctgttcctgccttaactgatgacatggtcttgtgaaattccttctcctggctcatcctggctcaaaagctcccctactgagcaccctgtgacccccactctgcccgccagagaacaacccccctttgactgtaattttcctttacctacccgaatcctataaaacggccccacccctatctccctttgctgactctcttttcggactcagcccacctgcatccaggtgaaataaacagctttattgctcaaaaaaaaaaaggccaggggaggccaattcnagcttnggacttaaccaggctgaacttgctcaaaagg

SEQ ID NO: 1958 - DNA, 268 bp, Homo sapiens
  misc_feature 21, 49, 55, 150, 189, 227, 235: n = A,T,C or G
tcagactgagatttcccattntggccacgcttcacatgcgacacatatngaagtncacagcagcttccccccttacctgcaagggatatgttcacagatctccagtggatgcctgaaactatggatagtactgaatcctatatatactgnttttttctatacatataataaaaggttataaattacgcncagtaagaagattaaaaactcaaaatatgagttaaacncatatgcnatataatatatgcaataaaattgaaatactggc

SEQ ID NO: 1959 - DNA, 287 bp, Homo sapiens
  misc_feature 251, 252: n = A,T,C or G
acctccagtggcagacagatggatagagctatataatcatcagtggaagtgtgtgatattctgtcttcacaaaccatcgtgcaaagcagaaccaacggccttttgtctgcttttagaaatgtctgcaagaatccctcccacctgtcaagttatggggatgaatatgtataaaatgcatcatgtatgtgtacctgtagaaaacactggattgggatgtgcagaggaaataaagcaaacagttttttaaaaanncaaaaaaaaaggccaggggggcccattcccctttg

SEQ ID NO: 1960 - DNA, 236 bp, Homo sapiens
  misc_feature 88: n = A,T,C or G
aatagggaaatttggatgcagagacacagagagaatgccatgtgaagatggatcagagacagaagtgatgcggctgcaagccaaggantgtgaagaatggccagccaccactggaagctaggggagacgccagcacagattctccctgagagtatccagaagaaaccaaccctccaacacctggatttcagacttctgaccttgagaagtgtgagccaataaaacaactgcagtgg

SEQ ID NO: 1961 - DNA, 283 bp, Homo sapiens
cccaggaccaagattgatttttttctgcaagaaggattctcaatcactattatgaaaaaccgaatggctttggaagttagcctttgctgcagacttgaaaatgtttcttcataaactcaccctaacattgcaaggtcaaatagcactacatgagaaatttatacttcagtgaagacattttgacaaaaactaacattgtttaaatcaccagtaatgttaagctgctttatacatgtcccattctgtcaaaggttaaaataaagagcaagatcttcattcctac

SEQ ID NO: 1962 - DNA, 256 bp, Homo sapiens
agcaagaactcggacctagctgcactaaggactaagcaaactacaaaggaagcaagagattggagtgattcaaggaagaagccaccgagccaaggaatgcaggtggccactaggagctgaaaaatgcaagggaaccgatgatcccctcagagcctctgaaggagccacccctgcccataccttgactttagcccagtgaaactggttctgaatttctgacctttagatctgtaagataatgaacttgtgttgtttt

SEQ ID NO: 1963 - DNA, 457 bp, Homo sapiens
  misc_feature 353, 357, 359, 362, 387, 397, 403, 439: n = A,T,C or G
tgcactggaacaaaaacactggtgtgccggcaaaagtttaagaaacggctctttggtagagaagcactgcttcattgtgtctgctgatttgcttaatgtttttgggtagctcttacactactgaactcctgcttggggcaaagttgccaaaaaagacttcgttatataacaacaccagaggagagcaaaagacttctagactttgggggctatttaaattctggtggagtctcgctctgtcatccaggctggagtgcagtggggtgatctcagctgactgtaacctttgcctctcaggtgtcaggcctctgagcccaagctaagccatcatatccctgtgacctgcacgtatncatncncanaggcccggaccaattgaaaaattcncaaaaaaagngaaaanggccagttcctgccttaactgatgacattaccttgngaaattccttctcctggc

SEQ ID NO: 1964 - DNA, 290 bp, Homo sapiens
  misc_feature 19, 27, 36, 51, 78, 86, 105, 112, 158, 161, 181, 270: n = A,T,C or G
tgcctaattcatactgganacggcagnccccccaangagtgacctatgctngagctaagcaccagccgcccttgtctngaggcagnttcatacaccacccaggancccccangatctcatgaatatgccggcactgaaagttgtagcaagaagacagnccnggccactaaaagagggaggngatcgtgctggccaaggttatcggaaatctgggagatgcagatacctggagtttcctttgctctttcgtgtcatattcaaataaaaatnaaagttttcttcagtccttt

SEQ ID NO: 1965 - DNA, 435 bp, Homo sapiens
  misc_feature 355, 380, 393, 401, 412, 422: n = A,T,C or G
gggcattcagataagccatcatatcccctgtgacctgcacgtacacatccagatggccggttcctgccttaactgatgacatttcaccacaaaagaagtgaaaatggcctgttcctgccttaactgatgacatggtcttgtgaaattccttctcctggctcatcctggctcaaaagctcccctactgagcaccctgtgacccccactctgcccgccagagaacaacccccctttgactgtaattttcctttacctacccgaatcctataaaacggccccacccctatctccctttgctgactctcttttcggactcagcccacctgcatccaggtgaaataaacagctttattgntcacaaaaaaaaaaaggggccgggnggggccatttaantttggganttaaccaggtngaacttgttnaaaaggggggggc

SEQ ID NO: 1966 - DNA, 191 bp, Homo sapiens
aaacacgcagcagtaacctgacgtgtctgtgaagacagcagagcagcctgcgcctctggaaacacaccatcatctgcctctctccaaaggacgggggagacgcctcatgtgagatggaaattaagcctcagaagcagtcatttttctttatattgtttggaattaaaaacatattaaattgatccattatg

SEQ ID NO: 1967 - DNA, 307 bp, Homo sapiens
acagaagagatcatggtcagtgggtcaggtccaccatgttgagcggcagtcaagtatcgcttacggataccatcacaaagaatttctaaggaaaaaaaggagaaaagacagacatacctcccggcgcaccatactacattctgactggtccagaagaatgttcaccacagttccccagagcccaccggaaatgttctgacaactgtttgctaaggccacacagcccgtttcaagggtggtcagtgctgatcctaatcccagtgaagtgaatctcacctgttcaaattaaagagaaagttgttgaatc

SEQ ID NO: 1968 - DNA, 593 bp, Homo sapiens
  misc_feature 6, 15, 20, 33, 54, 199, 269, 336, 474, 502, 507, 510, 511,525, 536, 545, 553, 564, 570, 577, 579: n = A,T,C or G
caaaanctccgggtnagaantgaccctggcaanatctggcaaacttgtccatcntattgaccgcggataacttctttgctttcatatcctgggaatctcttgctttgggtcttgcgaacttcctggtttcttgcattcctttgcgcttgcaccccttgggaccattaaaaaagaagaaagggaaccggggaaggtaagnggaatcttggaaaggggaccaacttggcacccccaaaacaaggggaaattcttgaagccacccaagcaanccacgcccaggtgggttaagcccttaagcccggtgcccatgttaagacgctcctggtgggccgtaangcacccgttaagctatgggtaagctccatgggggatcattgttgggcatccaccctatattggcaagtttctgaaaatgataaccatttttagaaaatggatgggaccaaaatgggatgccaagggtttaaagaaaanaaggtgtttaataaaaaggggcaaacancgganggnnccttccaagggggnttgaaaaactnggtttaaanaaaccttnccctgtgggtnaagggngggatancnccgaaatctttact

SEQ ID NO: 1969 - DNA, 676 bp, Homo sapiens
  misc_feature 3, 10, 11, 16, 23, 32, 35, 43, 47, 49, 50, 52, 61, 62, 66,67, 75, 77, 86, 119, 122, 134, 139, 142, 165, 178, 340,529, 533, 536, 549, 557, 565, 568, 571, 579, 596, 647: n = A,T,C or G
ttncctgctnnagctnaaaactngaagaaganganctgttggnactngnntngggcataanntagnntattcctncncccttggcntttgaattccacttggtggtcaaaaagggcttntgnaagccctttcantgggngangaacaaattaatttggtggaatngcccattcaaccnacccgaagcctttttgcaaccttattgaacgggtggggggggaatttggcttggcacccttcccccaggtggaaagaacccaaaaaaaggggtcacccccatttcccttaatggtccttggtggaacccttaacaaaggggtggaacttggtggctttggtncggggaacccccaagggccccaaagaaaccacaggcccgggaaaaggaaccttcccgggggggattaccaagcccattgggcttaaagggaaaggggacaaaaggaaaggtttggtcaaaaggaaattttcccaaacgcccaggggacccccaccatccccttttgggtattttggaattttcacaagntcangcntggctttcaaacngggaaatnggggcttnttnccncaccccanggggaattccctttaancacccccaaacccgggcctggcctttttaaattttttacccccaggggaangggacttcaccatttggggggccggaaat

SEQ ID NO: 1970 - DNA, 421 bp, Homo sapiens
  misc_feature 9, 12, 18, 25, 26, 29, 51, 54, 58, 66, 87, 148, 175, 177,183, 206, 223, 230, 263, 266, 283, 286, 287, 326, 334, 337,343, 344, 381, 384, 402: n = A,T,C or G
cagaaactnaancacatntgtgaannctnggggaaacttacaatcatggcncangatnaaggaaanccaagcacctcttaccatggnttgatgaggaaagaaagaaagcgaagggggagctgccacacacttttaaaaccatcatatntcatgagaactcactcactatcacaanangagcangggggaaatctgccttcatgatncaaccacctcccaccangcccttntcccaacatggggggattacaattcgacatganatntgggtggggacacaganccnnaccatatcacaatccaatgtgggtgatagctgctacagnaactgtantanacttgnnagatattaactgtcattgtcttgcaaatggaggctcnctncaaaagattaatatgcancaatgggtgaaccacacag

SEQ ID NO: 1971 - DNA, 249 bp, Homo sapiens
aaccaaactcaacgtcaggccgtggtttctgctcatcaaagaatgactgctgcgtgatcactaacgtgccaccacctgcacttcagtgtctcaaggtctcccctgccgctgacatttggaacaggctggtcaggatactgaggatgctggactctccttcgcagtggtctttgtataaacccaaggggaatgggaatttggagacaaaggaagccatcctggagcggccaaataaagcctttaatcttt

SEQ ID NO: 1972 - DNA, 452 bp, Homo sapiens
  misc_feature 8, 13: n = A,T,C or G
gctggaangctcntggagtgtgagcagagaggaagagtgcccagggactacaggaatttaatcaacttgagcaatcagactgttttacatcctcccagctgacagccggttttcccccaaattctgtgtggaatgcagccacatcgtctattgaaaccagctcctgacagaccccaacaacttatacatgaacctaagtgaactatcctcagttccatgctaaattctccaccgtgggaggggctacagcttcattagcataacatgagacccgtgttgctggcaggatgactcactacatctgcacaaatggggcctgtcctctatatgcgatgatccaccctttcctctctcacccccataaaaccctcctgtcgcttccttggggagacaccgctttggagaacacttgtagtgctctccttacttgtgacaagtaataaaactcctag

SEQ ID NO: 1973 - DNA, 276 bp, Homo sapiens
  misc_feature 1, 5, 13, 14, 15, 22, 26, 28, 33, 36, 43, 50, 90, 101: n = A,T,C or G
ncctncattaagnnngaactgncatngngtgtnacncattagnatgagtncacaattaaacatgaactggttcctgccgaaatgcaaaanaaacatgtcantactaagctgctattttatttgacagctcattttcctttttccctgcagtcatttgttgtttataagcaaacctgagcctccaaaacacccccaaaagtgcacacaaggagtcccataatcagtttctgactttggccctaaatcgattagaatacatctgatctgcttcaaatc

SEQ ID NO: 1974 - DNA, 300 bp, Homo sapiens
  misc_feature 172, 217: n = A,T,C or G
ttgtatggcaaccctgtaggctcctcaccggcccaagttggctttggggagacccagcccagcccagacgctccaaggaccccattggcagagctgcgaccagagaccactgctctgcaagccacgattgctgtccgggcagtctcacccacggggcagactgaatccttancttgctggtttgtgtcatcatccggcatcaggctcagttcaaatnccagctcctccacttccaagttgttggctttgagcaagtcacttaatgtcgctgcgttccatgccccatctgtgaaatgaatg

SEQ ID NO: 1975 - DNA, 432 bp, Homo sapiens
  misc_feature 16, 21, 24, 36, 47, 52, 57, 62, 72, 78, 82, 90, 93, 124,150, 157, 167, 188, 316, 373, 393, 415, 417: n = A,T,C or G
caaaattggggggggnttttnctntgcgccctgtgngtgtttctttnaatgnaaagnttttntgtggcaaanttaccntcgnatgcaggnatncaatggccattcagccggggcagttccagcnttcgggggacaggagccccaccccanttttgtntcccaccacntcgtgtggcgctaatcagganaggacagcgccatctgccaatcccctgggctctgacaccctttaaggtgtagcgcacacagcctcaggagccgccatgacaactgaagatgctacacgaaggccaggggatgctgccatgtcccccangcaggtgccccgcagcctgtggccccacgccatggtccagtgtgggggggaacaccnttgatttttaataaagagancagaagaccctggctgggtctntnaccactggcacttct

SEQ ID NO: 1976 - DNA, 441 bp, Homo sapiens
  misc_feature 334, 402: n = A,T,C or G
ccagcaacacagaatccacagaaggaagacaatggagctacaaggtgggagaagctgcctgggtctctaaatcactgtaagataatcaactgcttgggaaaacctatttggattttaagtgaacatgaaataaactactagcctgactcagctctcaattgactggggatgccattcaagaggagatgaagaagtctgtcttctgaattctgacctgatgtctacatacttaacaatctggcaggatataatattctcgggtcacaccttctttcagaacttgcagacactgcattatttcttttggcactgaattcaactgggagaagtctgnggccagccaaatgtttaaccatttgaaaggacttccttttttgcctaggttttccattttctttttangaactctcttttttaatcactaaacttttatttaaatac

SEQ ID NO: 1977 - DNA, 304 bp, Homo sapiens
  misc_feature 2, 4, 5, 14, 18, 19: n = A,T,C or G
ancnnctgaagtgncaanngaggctggagtgcaatggcaaaatctcacctcaccgcaacctccacctccggggttcaagcgattcttctgcctcagcctcccgagtagctgtgactacagagatgggtctcgccacgttgctcaggtggccttgaactcctggacttaaataaatcctcatatctcaacttcctgaacagcttggactacacatgtgtgccaccatgcccagttattaacataattttaaaataacatctcctgttctactataaaagtaagtggaataaaaggtcagaaaaat

SEQ ID NO: 1978 - DNA, 423 bp, Homo sapiens
  misc_feature 30, 371, 372, 373, 374, 375, 376, 377, 378, 379, 380, 381,382, 383, 384, 385, 386, 387, 388, 389, 390, 391, 397, 404: n = A,T,C or G
ttgaatacaaggatgtggtcaactatactngttcttaccgttgaaaaagaagtgctgaggccaggcatggtggctcacacctgtaatcccagcactttgggatgccgaggcagctggatcacttgtggtcaagagttcaagaccagattgggcgacatgatgaaaccccgtctctactacaaatacgaaaattagccattgtggtggcacacgcctgtaatcccagctactcaggaggctgatgtgggagaactgaaccctggaggtggggattgcagtgagccaagatggcgctactgtgctccagcctgggcaacaaagcaacactatgttttaaataaataaataagtgctgagatctcagaaaattnnnnnnnnnnnnnnnnnnnnnaacccnaaaaaanggggccggggggcccattt

SEQ ID NO: 1979 - DNA, 402 bp, Homo sapiens
  misc_feature 22, 24, 25, 31, 32, 33, 39, 44, 50, 51, 66, 67, 71, 75, 77,81, 89, 97, 100, 115: n = A,T,C or G
gactctggggagctcctgcttnanntaaaannngaggtngcagnaccccnntttaaaaaggggtcnngccntgtncnttgnaggaaggnatgctgcncanaggccaaaacaaatntcgacagtccttgctgggttccctcactcagtctagagtatcactatgagatcataccttttggtccaagcatatttctacatggttatcaatcatgcctatccaaggaagttttcataaaaggcctacgaggacatgatttggagggctttcagatagaggttcctggaggatgccactcccagggagggcatggagcttccaggccccttcccccatacctggccctgtgcatctcttcatctttattcattataatatcctttgtaataaaccagtaaatgtgt

SEQ ID NO: 1980 - DNA, 497 bp, Homo sapiens
  misc_feature 446: n = A,T,C or G
gtatcaatcatgaagttaataagaagtgggatcctccaaaagacaccttggctttccccacagtcatccacctgttccacctgtttcaacaggtgaactcactgcaggcacagaagacatctaaggactttagaagtgaggtagcctcccaggacaccaagacacctcccccaagaaatgactccatttgtacattttcatataatgttctttctacaagaggatctttgtaatttactagacccttttctttctcaaaatacatgaggataccagaggaattatcttctaaccctcattttgaccctttcacctacaaacttgattggatctgcctaatctctgaggaacttgctaagctctggttgtcaatttatatggccagattgacagaaagtatgaaagtcctgtggaactatgtttactttcacacatgaaccagtganggaagccagttcatctggtgatgcacattgatggctcttcttggtccccaa

SEQ ID NO: 1981 - DNA, 526 bp, Homo sapiens
  misc_feature 276, 403, 408, 435, 436, 437, 438, 439, 440, 441, 442, 443,444, 445, 446, 447, 448, 449, 450, 451, 452, 453, 454, 455,456, 457, 458, 465, 467, 475, 478, 479, 501, 508, 512: n = A,T,C or G
gtccagctaatgatccaatgagagcatcccaattcatatacaactttttcgattggctgtaaaagccaggtaatggataccaccaggagaggttgactggatacaccatatctcttcactcactcaaagacccaaactgatggagaagtaaacatccctaccagtcacagtggcagaaggaaagaaagctttgaagtgtcttcaactggaaatcaaattctccatcctagaagagacgatcattatttccttaatgattaattatttacaacttgnggacccggaagtcattatatgacctaccccaatcaccagggactttgtagtataattttaccacatctggaatgcagacaggcctaatatattggccaaaaaaatcaagaactactttgatcaagcntaaantaaaaggtggttttaaggaaaagttannnnnnnnnnnnnnnnnnnnnnnngggggcngnggggcccnttnngttgggattaacccgggttaanttttttnaaangggggggccccccc

SEQ ID NO: 1982 - DNA, 513 bp, Homo sapiens
  misc_feature 421, 433, 437, 475, 480, 481: n = A,T,C or G
ggcccagtgaacagagcccctggacattgccggaaggaaaggagaaagcccagcaaagcacacgacgtatcaggcttttcatgtgtcattgggtgaaagggagtcacatgggccaaggaggggaagcaggtgtcatcagagcagttccacagccctctaggcacagtaacaggcatgctttctgtccttctctccttttagattgtaagctacccaaagtccatctccatgggtttttttccttatgtgcaaactaccatatgacaggtgtgcctgacaataactcaggtatagctgagaatgatcctgtagtccaagaatgttggttctgagctctgaactaaggaatctgggagctgccaacccaaaaggttactccttatctatggagcataagtgaacccctggcccatttcttggnacaacatgtgcngggnaaccaaggcctttttttttaactaagggggaagggggnccggnnaaaggcccccaggaaaaagggggcccgggggg

SEQ ID NO: 1983 - DNA, 436 bp, Homo sapiens
  misc_feature 390, 394, 396, 397, 403, 410, 413, 415: n = A,T,C or G
gctgatctcgaactcctgagctcaagcgatcctcctgtcttggcctcccaaagtgctgggattacaggcgcgagccactgcaactggcccattaaatttttaaccccgtacttgacggatcagctgacactacccagaccagtaatctggctcaaccagtcctgcgatcccacccaggaacagaagacagcaagaaaacctcacttcaacactcccgtcgatgactccatcgacctcaggaagctccaaccaatcagcactccccacttcctgagcccctacccgccaaattatctttcaaaactcggatcccctaatgctcagcggagactgatttgagcaataataaaactctggtctcctgcaaaaaaaaaaagggccggggggccnattnannttgganttaaccnggntnaacttggttaaaagggggggg

SEQ ID NO: 1984 - DNA, 90 bp, Homo sapiens
  misc_feature 35, 37, 38: n = A,T,C or G
tgccttcgccccctgtgaggcctcagaacattcgncnngctccagtcatggccacggcaagtgactgctgatttgcctaaccccacatgt

SEQ ID NO: 1985 - DNA, 515 bp, Homo sapiens
  misc_feature 444, 472: n = A,T,C or G
tacctaaaaaaataaatcctggccgggcatggtggctcacgcctgtaatcccagcactttgggaggccaaggcgggaggatcacgaggtcaagagattgagaccatcctggccaacatggtgaaactccgtctctactcaggaggctgaggcagaagaattgcttgaacctgggaggcagaggttgcagtgagccaagattgcaccactacactccagcctgggcaacagagtgagactccatctcaatcaatcaataaaatcaacatattaaatgtcaaaatacttaagtaaaaatgttctacttgttctatgtcactgaaagaatagtcataaaaatccagtatgaaagtttttaacagactactttatttacattctattacttgataagcagcacttgaataaccaaatttatattatcccagaaagttatggacactangtgcttcaagaagtttgctgaattaaangacagatttacttattggcttttggttaaaaattatgcaaaaa

SEQ ID NO: 1986 - DNA, 528 bp, Homo sapiens
  misc_feature 132, 412, 515: n = A,T,C or G
ggtggagtctccgggaggatggctgtggaagaactgccaattccaagggcctggtcaggcagaggcattcttactattccaaaacaaggaaagggtaaaaccaagatgtcaaaggccccgctggtgtggaancaaatttctgcctccaccagctggatggctgctacccctgtacaggtccctaacactggaacagggatcaacccaagtgcttggggctcaccatgtcctcctccccagccaggacagcaagtggaagacacaggcgagctgaaagaggctcactgtgtgcccagccctaaccccctgcctcattggcaccaggcacccaggactcctcagaactcagagccagggtttgggcagcctcctcgtagtgctccttgaataggatttataggacttgcaccangagctttgggccattccaggggacattgcttttgggggaaaaaaaggacccaatatgggtatctaagaactttgaagcatgtcgtcagaaatcggagcttcanggaattgggaaat

SEQ ID NO: 1987 - DNA, 537 bp, Homo sapiens
  misc_feature 333, 415, 473, 476, 511, 522: n = A,T,C or G
gttctgattgatgcagaggctgttgaagtagaccacacgattaaagcaagagagggagatagaagtggagatggcggcaacctattatacctggatatatttggtatacaaacaaagagactcaatgatgaattgaacaatgaatctgaaggaaaaaggagaaagaaaacacaagtgtgcaggtgtcaattgtataccatcatagtaccatcaaaagaagtaggaaatagtggagatgaagcaggttgatatgatttggctgcttccccacccaaatcttaccttgacttgtagttcccataatccccacatgtggggggaggaagcctttangaggtgatttaatcatggggtggttacccgcatgctgttctcatgataatgagtgagttctcacaagatttaacgtctttanaaaggaactttttccccttttacttggcacttcttttttgctgttggcattgtgaaanaangacatggttgcttcttcctttcccccttgattggnaagttcccganaacctccccagcctt

SEQ ID NO: 1988 - DNA, 367 bp, Homo sapiens
  misc_feature 18, 164, 170, 353: n = A,T,C or G
gtgctgagttgaatactnggatgtggtcaactatactgttcttaccattgaaaaagaagtgctgaggccaggcatggtggctcacacctgtaatcccagcactttgggatgccgaggcagctggatcacttgtggtcaagagttcaagaccagattgggcgacntggggnaaccccgtctttactacaatccaaaattagccattgtggtggcacacgcctgtaatcccagctactcaggaggctgatgtgggagagctgaaccctggaggtggagattgcagtgagccaagatggcgctactgtgctccagcctgggcaacaaagcaacactatgttttaaataaataaatnagtgctgagatctc

SEQ ID NO: 1989 - DNA, 189 bp, Homo sapiens
gtaaagatcatcttgttctgctgaaagtcaaaagcagcccctattgttgttttttaaataactctctaattaaaaccaaacaattctgtagactcttccataggaaatatattcatgaggctgatgcttatagaaagttttatcttgtgagttattaaataaaaatgcattcaaatttcaagaactgtt

SEQ ID NO: 1990 - DNA, 157 bp, Homo sapiens
gtttatggatatgctgcctcttctgctaaactgtaaatctttgaagaccaggagccacgtcttacttatttgtgaatttccataacatctagtagagtgttttccacctaattgggcgcaataaatgtttattgaaaaaataaagaaggctatgggg

SEQ ID NO: 1991 - DNA, 416 bp, Homo sapiens
  misc_feature 363: n = A,T,C or G
ccaagatggagtaacagagaccagattcatgcttctgcctgaaacaaccaaaacacagacagaacatatgaaacaatgtcttcaaaacactgaacatcagcgatggaagcaggaggcagagaaattctaggcagacaggggcgggtccccagtgaaacagcaccttcaagtcaaagtagcctgaaacctgctgcccaagaccctggactcagtcagtagaggagagaagcagcttgactggagagaagcaacttgacttcagagggacagctggacttcagaggaaagatagcttaacttcagagggacgctctgacttcagggaagattacctgaccatcccatcccccttttcagcttctntttttcacttggagacttcctttggttaaataaaataatctgcctccaccatc

SEQ ID NO: 1992 - DNA, 395 bp, Homo sapiens
  misc_feature 301, 322, 345, 348, 353: n = A,T,C or G
atgtgaaaaactaagacacagagcagttaaaagatctaatgacagaactcagaatggaacacaggtctcctacttctagactcatgtttttgaggagatccgtggatcagcatctctcctggtcaggaccacagaggccttccacccgctgtgtgaagcctcgttggatgccagcttcaaaagcaaaaggtatgtcaatgttccataaagagaggatcgtgactctccccctgtgcaagtctggagctggagagcactctttctgtgggatgcagtcaccctgaaatgaaactctctttantagcttttacttgagaagatncccatatgccctacctacttatngtnatgcnctcttatattaaaaaaaaaagttggggagtttaaaaggacca

SEQ ID NO: 1993 - DNA, 429 bp, Homo sapiens
  misc_feature 386: n = A,T,C or G
agatgaagtcttcctttgctgcccaggctggtctggaattccttgcttcaagcgatcctcccacctcgacttcctaaagaactgggattacaggcacaagcctgccccactctgcaacccggtgtagagaccgctacatcaaaagcacatagtaggagggaagaaaaaacccacagagttacaataatgaaagtctggaggcaaatagagtagaagtctacttgaataggtatccctccgtaggatagttcatcacatattagaactagaaaggtccttgaagtttatatagtggctgggctaatctgttagattttcaaagtccaccaagatcagttaaacaattgctgagctaaagaaaagaacttaccattcattggagtttntttgccatcccatgcagttattggaaataaatatttgtatgct

SEQ ID NO: 1994 - DNA, 345 bp, Homo sapiens
acaaggcctctgcgaaccaggctggagtgcagggatctcggctcaatgcaacctctgcctcccacgctcaagcgattcccgtgcctcagcctgcagagtagctgggattacaggctgggattaccaccacgccctgctaatttctgcatttttagtaaagacagggtttcatcgtgttggccaggctggtctcgaactcctggcctcaggcgatctgcccgccttggcctcccaaagtgctgggattacacgtgtgagccactgtgcctggcctattcctgatgactctccttgctctgaagtctgtactgtctgaaattaatatagagactcctgctttctttt

SEQ ID NO: 1995 - DNA, 388 bp, Homo sapiens
agagatcccccaagatgtaaaagttccaggttccaaaaaacctagaaccacccttaaggatggaccacgaggatctgacagccttttgcaaaggctcaccagccccgacctcagcagaggaaagacgactccatgcttggctagcaagggcaacggtgccaccagcttcatatgtcccacctggcagggggctcctaacaggggtcagagcagtactgtgacctgaagctctccctgctgcctcttcttcgtgccccttttttacccatcacagctatttcccctaatacatcttctgcatgtgcttcttggaggacctgagatgacactgagccagactgaatttttcttttttgccataatcagaatggattaattaagaattaaa

SEQ ID NO: 1996 - DNA, 310 bp, Homo sapiens
gagaaagtcattattcacagaagatgcatgcgaaaccgcccttgcagaattacgactgagacgaccctgcacgtgatgcatcagctggcaccacccagatgcataaactggctcatctgatcttgtggcccccacccaggaactgactcagcacaagaagacagctttgactctctatgatttcatctctgaccaatcagcactcctggctcactggcttccccacacccaccaagttatccttaaaaactctgctccctgaatgtttggatagaacgatttgagtaataataaaactcaggtcttctgc

SEQ ID NO: 1997 - DNA, 455 bp, Homo sapiens
  misc_feature 371, 407: n = A,T,C or G
gaatcatgtttacaaagcattcccttggcaagaggctgtctataggatccagatggtctgaccccaagtcagatgtcctttataaccttgcttttatggtcctctgaccagcagcattaacatcaccctcacctgggagctcattaggaatgcagaatctcgggcctcatccctgatccactgaattggaatctgcatcttaacaagatcctcaggcaatctgtaagcatatgcatggttgagaagcactgctgtacaacactttgtaacaatctctcttgtccaagagcggggacgaagctagctgtgaaagctaacacaggtctcaggtgttcttcttcctgcaagtgagggtggagggtctgcattgngggtcattttcccgaataaccttccttgggatcganggctcctgtctgccaaaaagaagccagaatgaaatgatgctgtagaaa

SEQ ID NO: 1998 - DNA, 397 bp, Homo sapiens
gtctccattgcttgcgatgatattaatgaaacagctgctgatcttattgaagttaccttgtgcatggagatggagtccctctctgtcacccaggcagaagtgcagtggcgcagtcttggctcagtgcaacctctgcctcctgggttcaacggattctcctgcctcaccctccttagtagctgggattacagcccgtctaatttttgtattttttagtagagaaggggggtttcaccatgttgaccaggctggtcttgaacccctgacctcaagtgaaccacctgccttggccttccaaagtgctgggattacaggctagagccactgtgcctggcctaaatttcatactataccgcatttaccctctatttaatataatacacccaattaagggttt

SEQ ID NO: 1999 - DNA, 443 bp, Homo sapiens
  misc_feature 382, 401: n = A,T,C or G
gtgagaaaataaagcccagagaggacaatcagcaaggaatccagcaccttggagccatggaaacccttcttggtgcctctttaggctcctcatggcagcaggggcaggagggcacacagggtgttgtgcacctagccccaggtggataagaacatccagatgcacctgcccttcactagctttgtcatggccctgcccccatcccagcttcagggtaaacccctgctaccttcagtgctcagccagtaggtcacttcctccaggaagtctgccatgaccaccaggttagttttgctctccttgttctgtgctcccatggctccaaaactgcaccacttctaaagatgcattcatctttggatctgatccctgggaagggatngaccagcattgtccatcantcttgagtccccaagcaccccacccaatgccagcacatagtg

SEQ ID NO: 2000 - DNA, 346 bp, Homo sapiens
  misc_feature 307: n = A,T,C or G
acaaggtctctgcgaaccaggctggagtgcagggatctcggctcaatgcaacctctgcctcccacgctcaagcgattcccgtgcctcagcctgcagagtagctgggattacaggctgggattaccaccacgccctgctaatttctgcatttttagtaaagacagggtttcatcgtgttggccaggctggtctcgaactcctggcctcaggcgatctgcccgccttggcctcccaaagtgctgggattacacgtgtgagccactgtgcctggcctattcctgatgactctccttgctctgaagtctgnactgtctgaaattaatatagagactcctgctttcttttg

SEQ ID NO: 2001 - DNA, 444 bp, Homo sapiens
  misc_feature 405, 426: n = A,T,C or G
acaggaatgtcaaggcctctgagccgaagctaagccatcatatcccctgtgacctgcacgtacacatccagatggccggttcctgcctcaactgatgacattccaccacaaaagaagtgaaaatggcctgctcccgccttaactgatgacattgtcttgtgaaattccttctcctggctcattctggctcaaaagctcccctgctgagcaccttgtgacccccactctgcccaccagagaacaaaccccctttgactgtaattttcctttatccacccaaatcctataaaatggccccacccttatctcccttcgctgactctcttttcggactcagcccacctgcacccaggtgaaataaacagccatggtgctcacccaaaaaaaaaaaggccagcgaggccnatttagcttggacttaaccangctgaactttgtttaaaa

SEQ ID NO: 2002 - DNA, 401 bp, Homo sapiens
  misc_feature 336, 338, 340, 342, 345, 354, 356, 367, 370, 379, 381: n = A,T,C or G
gtacacatccagattgccatttcctgccttaactgatgacattccaccacaaaagaagtgaaaatggcctgttcctgccttaactgaagacattgtcttgtgaaattccttctactggctcatcctggctcaaaagctcccctactgagcaccttgtgacccccactctcctgcccaccagagaacaacccccctttgactgtaattttcctttacctaccctaatcttataaaacagccccaccccatctctctttgctgactctctttcagactcagcctgtctgtctgcatccaggtgattaaaagctttattgctcacaaaaaaaaaaaggncngngnggncaattcagntnggacttaaccnggntgaacttgntnaaaaggggggggccacccaa

SEQ ID NO: 2003 - DNA, 306 bp, Homo sapiens
aatgaaggagctggacttggagatctctctcacctctgaagttgtgtaagtgaagtatactgacccagtgtgaccacgctgctattcgaagacttactcaaagttttcaaacagactaaccatgtgggactgtgatttagcaaggaaaacagccagaataaacatgtcagtgtctccgttttatggtggcttcatgtgcagcattgtgacctatacctcggagtttttcttataccagatgaagcttgttctatagtcttcacaaggacataacacttgtcataagtaaatgtttctattctcttg

SEQ ID NO: 2004 - DNA, 224 bp, Homo sapiens
gatgcagctgactgcaatcaactgagactgtggaatggtggattaggaaggactacagtatactgaagggtgagggtgaggacaagagaagggaaggtggtggagatgattattcaacagtcaagactctgctagtacacaagacaccagaaatccggaaggcctctccctgccccgccaaaacaggagaaaaaataaatttctgaaagattttgatatatttt

SEQ ID NO: 2005 - DNA, 318 bp, Homo sapiens
gtggggtctttcaagggcagccttcgtctctcgctgacagacagcaagaaactgagcccctcagtccaagtccacaaagaattgaatgccgccaacaactatgcaaggatgtaaatgaactattcttcacttgagcctcggaagggaccataaccctgactgataactgataatagttttgtgagatcctgaaagcagaggatactcagactcctcattcacagaagctgtgagagaattcatgtatattgttttatgtctctaattttgtggtaatattgttatactttaatggctaataaagctaccaactcaccg

SEQ ID NO: 2006 - DNA, 133 bp, Homo sapiens
  misc_feature 12, 13, 16, 17, 39: n = A,T,C or G
aactgacagggnncannggctcatgcctgtaatcccagnaatcccagcactttgggaggccaaggaaagaggatcattttgaagccgggatatggagaccaacctgggcaacaaagcaagacctcatctctac

SEQ ID NO: 2007 - DNA, 114 bp, Homo sapiens
  misc_feature 22, 29, 33, 37, 44, 64: n = A,T,C or G
gatcacgtcagatgttttttgnacccccnattncagncaccagnttgaagacccctacagaggntggggattggagaccaacctgggcaacaaaagcaagacctcatcttctac

SEQ ID NO: 2008 - DNA, 409 bp, Homo sapiens
  misc_feature 7, 37, 78, 127, 169, 223, 229, 233, 289, 335, 342, 363, 374,376, 392, 394: n = A,T,C or G
atggagncttgctccgttgcccaggctggtgtgctgnggcgcaatcttggctcactgtaaccttcacctcccgggttncagctgattctcccaccttaacctcctgagtagctgagattacaccgcngttcaccaccatgcccagctaattttctgtatttttagtacnaaacgggttttcaccatgtttggccagactggtctcaaacttctgaccttaggnagatcntggnccaccttagccttccaaagtgctgggatcacagtccttgaagccaccgcgcctggncgacaacaggcttctttgaagaacaaggggccttctttaaattttnaacaaantctcttgcctttgttacacangagtatggggntncaataaattgtttggntnggatttgaaatttgc

SEQ ID NO: 2009 - DNA, 411 bp, Homo sapiens
  misc_feature 81, 141, 149, 190, 276, 306, 333, 348, 350, 354, 358, 360,364, 366, 367, 368, 369, 372, 373, 377, 380, 388, 389, 390,394, 398: n = A,T,C or G
actgaggcctctgagcccaagccttcacgtatacatccggatggcctgaggcaactgaaggaccacaaaagaagtgaaaanggccagttcctgccttaactgatgacattaccttgggacattcctcctcctggataatgnctctgganctccccaccaaacaccttgtgacccccactctgcccacaanagcacaaccccctttaactgtaattttccactacctacccaaatcctataaaactgccccacccccatttccctttgctgactctnttttcggactcaacccacttgcacccaagngaaataaacaagccttgttgctcacanaaaataaaaaaaaangncaanaggngncctncnnnntgnnaatnaancatgggtnnngttntgtnaaaaggggggggg

SEQ ID NO: 2010 - DNA, 165 bp, Homo sapiens
atcaatggttctcagtgtgatctgcagagcagcagcagcaatagcagcaacatctgttcctataggttgcactgtggagcaaatataccaggaggtcttgatttcctttttctccctcaccatccgataataaatccaagtggaatgctaggaattggtaaaaag

SEQ ID NO: 2011 - DNA, 461 bp, Homo sapiens
  misc_feature 423, 425, 437, 439, 441, 447: n = A,T,C or G
caatgatgttcagttccaattttccaactccccagaagatgctccactgctccactctcttgccaccatggtcattccaagaaacaaatctgaccacagcacttctccccccacacccttcccaacacagcatggactctgcaacctggtatgaggggcctctgcttcactccagtcagtcccatggctcccaaagtgtggtctatggactcctaggggtctacaagatccttccagaggttttacgaggtcaaaagtatttgataaaaatactaagacatttcttggctgggagccatggttcatgcctgtaatctcagtgctttgggaggctgaggtgggagggttgcctgaggccaagagctcaagacaagcctgggcaacatagaaagaccctgtctctacaaaaaaaaaaaggccagngnggccaattcagntngnacttanccaggctgaacttg

SEQ ID NO: 2012 - DNA, 475 bp, Homo sapiens
gtaacccacagcctcatcctggggaagcgagaaatggtaacacataactggccaccgtccaagctccttagaatagaagttcatgggaggaagcatccacatgtgcactcacatcttcagaacgctgcgcctcctgcccccaaacacactgacctctgccttttcaaaggcaaaatttgatccattaatgttccccagtgttggtttcataaagcgtttggatgggcccttcttcacaaatgaataaaaatgagtaaagtcctcagaatcaaaggaaagccaggactggcttccagaagcacgaggcaacccagagagtccatctgcagccaaaccatgcaacagacccagccacagcttagaggctggcaacaagtctgcctgcaggatctgccaaggaaccagatgctgttgcttccaaagcttggcatcagggcccctgattgccattcaacaaagaggaaaaataggggat

SEQ ID NO: 2013 - DNA, 371 bp, Homo sapiens
gaaacaagttctagttggaatgggaagctcattcaacaaccaggcatcatccgcccaccaggatctcatgctcctaaggcaccggctcactccaggagactgagatggctgaaaatgaagaacagggaaacttggacccagagacatactcagaggaagaacgctgtgtgaaggcggaggcagaggtcaaggggattcatctatgagccacagactgccacagactgccagccaaccctcaccagagccaggagagaggcacagggcagagtctacctcatacccctcagaaggagtcaacggtgctgataccttgatttctgacctttaccttcagaactgtgagacaataaatttctattgtgtaagcc

SEQ ID NO: 2014 - DNA, 216 bp, Homo sapiens
ctacagagctgcatctgaaacactggctctagcatcccctatgagcccaactgcagagaagggggctgtagcccttgaagccatgtgaaataagacctgaagtaaccgcgatgccagtgtttggccacccttggctgaaataacatatttacccagcaacaaagctttcccatccatttttatttaagagagattttaaataaaatctagtaaatg

SEQ ID NO: 2015 - DNA, 483 bp, Homo sapiens
accagtttgaagcagaagaatgtcctgataatggcatagagccaaagcgattccatcctctggacatgagctgtgtggtgtccccgtcctcatacctattccagaaccacactggtccctgctctcgtctccgaactgtcggaggacggacctgcttttgcaaggacctgaactccctgtgttgttgcttaagatttttacccaggcatgaaaaggaaatgaattctgccaactcatcgctgtgtctgtgggaacagaaactcagggcacctattctctgcaagaaaagcatcaattccctgtaagaaaagtttcccacctgagacaatgacacagaccaacataaatgctcttttggttttatgatttctgatattagattttacttgatttttttaattttaattttttaaatttcgttttgagagttaaaagtgttacttcttttatttccagcagttcaaggaatttcagagcaatctt

SEQ ID NO: 2016 - DNA, 233 bp, Homo sapiens
ggaaaacacaacacctcatgcagtgaaggactgaagctcctcttgggctggtattcctgaggcagaacacaggtccctcaccccgatgcccacgaccactcagtaacaacatctaccaccattcggaggcaagacaaactgcatgagtaacccagcacagccactcagatgtcacttcttcctggtgaagaagcagaaccctagattcacaaaataaacagtcatctacaggc

SEQ ID NO: 2017 - DNA, 366 bp, Homo sapiens
ggtgggggaatggagtctcactctgctgtctaggatggagtgcggtggtgcaatcttggctcactgggacctccgcctcctgggttcaagcgattctcctgcctcagcctcccgagtagctgggattacaggtgcccgccaccatgcctggctagttttggtatatttagtagagatggaatttcaccatgttggcaaagctgatctcgaactcctgacctctcaggtaatctgcccgtctcagccttccaaagtgctgggattataggcgtgagccactgcgcccggcctatcattgctgtatttcaagtacctgtttaccttgtagggtctgccctaccaaattaaaagctttaaaggatggac

SEQ ID NO: 2018 - DNA, 368 bp, Homo sapiens
acaaccctctcacagagcacagagcgcttcacctatgctgctgcccggaatccgaagaatgtggagaaacagagcctgcctccacctcttcccagctgtgggggaccataataatacaacttcctcctccccaggcttcccagcacccacagacaacgcgcaaaacacaatttaaggtggaccgactttacaaaaggcaggcacgcctacgcgatgagcactggatctaagcagaaacgcagagccgcccaagccaggtccatcctggccccgctctgcacctcatgccatgatgtaccgcacaggccttctgagggggttcaaatcccatgtcaacaaaaggaaaaattaaaggcactctaatcggt

SEQ ID NO: 2019 - DNA, 487 bp, Homo sapiens
  misc_feature 461: n = A,T,C or G
ggagcagtgcatactcttgttgtgggatgagtgatgaaatcacaccacgggtgcccattccaggcaggttgaattgccccgggcctacagaaaacctgacctcctacaagacagagacaccaaatgcccaccgatggacaagcagaggaccaaggggttcctggtgttcatcgtgcaggaaacactgcaaacagctggggagatgggaatacttgacaaccacctttcacgtccagagatgaccaactaggaactgtcctcccccatcacccacaccccagcacagtgattactcagccaaatgcctgcagggccagcaggtaacacccatgactgaaggtggcggggcaaatattacaacagggagaggtggaacaaatttgggctcgtatgccctagataagaggatgaccaccgcccaattccaactgggaaagcaggccccgtgttgccagaccttnagaatttttcagaaaaactggaaatt

SEQ ID NO: 2020 - DNA, 325 bp, Homo sapiens
  misc_feature 15, 17, 21, 23, 36, 39, 68, 71, 107, 125, 127, 128, 240,244, 254: n = A,T,C or G
gggctattacctttngncccncnaagtggaaaaagnggnaagggggggggaaaatggtgggagccctnganaacagaccacttcaccaagagggcccaaggtgattngtaaaaagaagaccattncnncattccttcattctggacccattctaccaaagcctcaagaaagaagaaggggcctgggaaacaagcttccttttcccttcaccaagccttcaagaaagggaaattcaaactnttgnccccccattncttcatcttggggaactttcccaattttcttggaactttgggagaaaaaataaaattttcttggttatttt

SEQ ID NO: 2021 - DNA, 495 bp, Homo sapiens
  misc_feature 11, 423, 429, 436, 438, 472: n = A,T,C or G
attcatagccnatgatgattaattggagatgggatttttgaaaaccttcctagccacttagctaagggacagctttcccctaacactctcgtgattggtgtgaaaatgaaacctgctctttccagaacaatgagaatgctacctctgccgacaacattcccatccaactaagatcaagccagattgctcttgagtcattggttagtaacccatgggaagaggaagagtagctgcagttgacctataaactctgccttggccttgtcccaagctaatccctattacatcccacagactgtccctggagtcagaagttgtccccagacttgtcctaatggcctagcacagtgggaagttgtccaagaagtcatggtcatcaaagagaccttcagagaccacttaattgtacaagactttatttgncaactnctaaaantnctgagtgccatgggacaaggcaaggaagatgtanttgctgggcaagaaaagggagca

SEQ ID NO: 2022 - DNA, 355 bp, Homo sapiens
  misc_feature 10, 17, 18, 23, 46, 65, 80: n = A,T,C or G
gaataaaganccttttnnactcnctaagtgaccgggattgaacccnacatcaagaaattggagcnaagttactttgtggnttaacaaagcattaggaaatgggactctcaagctctctcaaaaagtatcaaagaagtgaaattcatcagaccactgtgtcgagacaatgagacgccagatgccagattccttatttgtcatgattgcttccttagccctccctagttcctgttttcctgctcataagttacatttcttccttgctatataatcccctaatttcggctggttgaggagatggaattgagactgatatcccatatccttaactgtagcatgcaattaaagccttctt

SEQ ID NO: 2023 - DNA, 521 bp, Homo sapiens
  misc_feature 422, 493: n = A,T,C or G
ccatctgcaaccagagttgagctgtgaaactgcagtcagagaggagggtatggcttagtgcaaatgtggaagtctcagtcatacagaagaaaatgaaaagcctgttcttcctcttcacaggattgtgagaagcagggatcttgaggtctcaaatgccctattggaggtcaggctctggagattccaagatgaccacacaatccctcctccgtggaattcacagttctgagacaagacagagaccaagcagctccaagccggcccctctgtttataaaaccaagttccgggccaagtgtggtggctcacgcccgtaatcccagcactttgggaggccgaggtggccggattacctgaggtcacatgttcaagatcatcctgggcaatgtggtgaaaccccatctctactaaaaatacaaaaantaactgggcgccggggtgcatgccttttgatgccagctactcgggaagtctgaaggcaaggaagaatcgcnttgaaccccgggaagtggaaggttgcaa

SEQ ID NO: 2024 - DNA, 510 bp, Homo sapiens
  misc_feature 1, 3, 7, 395, 454, 477, 496: n = A,T,C or G
ngntctnctaagactacaagggaacactgcgactttccctgaggctttgggttactgggaagatgaggaaggataaatgtgaagttgtggactgttttaaattccacctgaccattctgctttcctgagcaacctacccacgccaatttagtactggctttcttcagagcattaggacaatgggattctgtctacagctgtgccatgaacggactctgattccttaggcaaagaatctcttcttgctaaaatagttaatttgaaggaataacaggaatatataaaataatgtctcaaagtgttttggtcacctggtaaagaactagatttcacatgaatgcaacataatcagtactatccttagctattgatgacatatctaaatgggacattcngggcattgtccggagcatgctgacagaagcattatattttcttaagaaaacttaatggngccctcatttgaccactttttancatgttccaaaccttccanacattgggatttaa

SEQ ID NO: 2025 - DNA, 504 bp, Homo sapiens
  misc_feature 433, 442, 477: n = A,T,C or G
agaaccctgactaatacaaatgtggaaggactagactggcttagtcttcaggcctacatctttctcccgtgctggataattcccgcccttgaacatcatactccaagttcttcagctctgggactcagacctgcaaccaccgactgtaggctgcactgtcagcttccctacttttgaggttttgggactcagactggcttccttgctcctcagcttgcagctggccttttgtgggacttcaccttgtgtcgtttgctgaagcacatggctgaaacgctttcccaaagagttgtgccagtttctactccaaacagcattagagaggaatctggacctgctgcctccaaagttgcctctggttctgaaattttatggctacgattctatcacaaaattcacaacgatgctggaagtggttctgctgtgaccaaanggggaggtnaatcatcgtaaccccaaaaggatgcataatggaantatcataaggatttgaaatatgtccta

SEQ ID NO: 2026 - DNA, 513 bp, Homo sapiens
  misc_feature 372, 402, 461, 466, 496: n = A,T,C or G
gcacaaaggaagactacatttcccagtctgattgtatctatgtggggctatgctaccagttctggcaaatggactatgtaccagcagcacgatataccacttcatgcctagcacctacaatctgcaagacagcatctgcattctcctctctgtctactgtaggattatcagtgtccagcaaaaccaggacattcaccaacatattttgtcaaatgacacagcaagaaggcccttaccagatgccagtcctttggtcttggacttcccagcctccagaatggatctgagtctttgttttctgctcaacaagctgctgagcagcaatcccagccccagggcccagagcaccttcctctgggagtccagcctcangactgtgctctgcctgcccctactgcacangcctcaaaaccacccacctcaacttctgggtcaagcacagtcaagaagcaaggtaagangctgngcttcactggatgaactctatgaatctgcnttttcgtttcaagctgt

SEQ ID NO: 2027 - DNA, 501 bp, Homo sapiens
  misc_feature 422, 458, 467, 480: n = A,T,C or G
tcttccctaaaggcttgatcaattcagcttacttaatcacaaaactgtaacgacagaatatttgcaagacctattcaagaagtcttcacaaatatgaaaatctctctccttcattacgtgaaaaagacacttgcacatgcatgtttatagcagcacagttcacaattgcaaaaatatggaaccagcctaaatgcccatcagccaacaagtggataaagaaaatgtagtatacattcaccatggaatactactcagccataaaaaggaataaaataatggcatgtgcagcaacctggatggagttggagaccactattctaagtgaagtaactcaggaatggaaacccaaatatcatatgggagctaagctatgaggatgcaaagggataagaacggtataatgaaccttggggacttaaaanggaaggatgggaaaggatgaaggataaaaaacttcncattggctncagtgtacactgntcgggtgccaccaaatcttca

SEQ ID NO: 2028 - DNA, 500 bp, Homo sapiens
  misc_feature 426, 444, 447, 470: n = A,T,C or G
ggtctactgcatagaaaacattcaaaaatatttgtagagtaaatgagcaagtgtcaaatacatgaatgaattgcatggcacatagtacttaacaggaaagagacagaaaagcgttgatatgaagaatttctaaaatcctcatatgaaatgagtaaaattaaggataaatgacactggaaaaccaaaatggcttccatatctttccaaatgctgctgctgatttgttcacatagaagcctattcatcatcctgcaagatgaagttggatatctttcaccgtctttttgaagtcatcatcagttttcctctcctacccccaggcatgagttttgtatcacttacatttatgctccacaatgggaatattgatttggcccaaataaagacattcaacaaattcttaatgagtggatcaatggaagattnctgccaaccaaaatccanggnaatccttgagttgcacagtggantggcattctctttggattcattttcctaat

SEQ ID NO: 2029 - DNA, 375 bp, Homo sapiens
  misc_feature 16, 40, 231, 268, 318, 355, 357: n = A,T,C or G
actttgcccaccattngaatccctagtacctgtaataacngactggcttggagttggcagccaacaaaaatttgtcgaacggatgaacgaaatgaaggaacgtgagaggtacacaggaaccacaatcatataaggcaaaacttgccatgtttggagtggagcagagcttggaaggcccgtacaaataagggcatgtaacacccttccagacagcaaggattttaaatggangatccctaaatggccccgaaagaacttcacccttggntaggaaggcttcaaccatttcccccacccttaacctttttttaaaaggantacaaaccaaattccaaaaacttttaccaaaaccttngnaaattttcttaagccttg

SEQ ID NO: 2030 - DNA, 599 bp, Homo sapiens
  misc_feature 7, 15, 72, 75, 128, 181, 215, 221, 302, 327, 350, 355, 443,459, 466, 472, 475, 503, 528, 581, 583: n = A,T,C or G
atcatgnaaactagnaggatttcgggaccattcaagcaaaaccaccattggaaaaaggttcgtgcaccacanatnggtggtttttaaaaccaccaaggaaattgggggtgttggaaaattggaaaagnaagccaaaggggcctttttattttggaaaattggaaggggaaaaaccaaggtnggaaggccttcccgcggggattttaattccgganaaaagnggggtccaccttggggattttggcccttggcccaccaaggggttttttttggggaagaccttggtcttttttcccttaagnaccaattcccaccccggggaatttngggggaagaccaaaaaaaatagnttggnttggccaatttttgggaccaaaaaccggtttaacctttccaagggaaaaggaaattttaattgggtttttgcccccaacccccaattnaatttgggaatttttnaattccnaaaggnccnccaaccccaaattggggccctttttaanttcccccccctttgggttgcccaanaaggggaaaattgggaaattttttaaattttttccccccaatttaaaagggtntncccccaacccaaaagg

SEQ ID NO: 2031 - DNA, 381 bp, Homo sapiens
  misc_feature 20, 22, 27, 37, 40, 45, 58, 110, 150, 189, 224: n = A,T,C or G
agactaccctagcattaagntncaagnaactaggagnctngcctngcaagaccaaagncccccttgccaccattggaaaggaaagcccccattccttggttggggttagnggaaggaaggaaggttggatggccccaaccaccaccacgnaaggaaaaaaaaggaaaaaccggaaggaaggaaggaaanaaggccacggaaggaaggaccacgcaaggaccagnaaggaaggaaggccggaaggccattttcttggaaaagggcgccaaggccttccccccttttctcccccttggttggccttttccccaagaggttccccttggttggccttttggccccaaaattaaaaaaccttggcccccttttttttttcttttc

SEQ ID NO: 2032 - DNA, 630 bp, Homo sapiens
  misc_feature 14, 39, 48, 57, 78, 117, 137, 159, 179, 205, 209, 270, 292,457, 512, 580, 587, 612: n = A,T,C or G
ctgggggggggagncttaccctggcatttaaaggtgcanggaactggnaggataatnaaatggaaaggattcttgggnaaccttggaaaggatagcccattttccattaccaaggcnccattcctttaaaccccctnaaaaaaggggaaaaaaggcctnttttggaaaggggggcccanattggaccaggaagggattaaccatnaagnaaaagttttggggaaaattcttgccaaattggaaaagccttggggattttttaagggaagnggcgttttaccccccacacctnggaaaaggtttaaaaggggattttaaccttttggggccttggcccattaaggccaattaaaaccaaaattggaaaaggtggaccttggaaaaaaaaattcccaagcaaaattttttccaagggaattaaaattcttaattctttaacctttttaaaaaaccaatnggttttttaaaaaaggttaattgggttttttttgggtgtttttttgggccaaggnaaccttttttttttttggccaatttaaccctttttaaattttttttcctttaacccaatttggggggngtttttnaaaaaaaatttcccgggaacccttngggttttttttttttttt

SEQ ID NO: 2033 - DNA, 258 bp, Homo sapiens
agtgcctgttcctgcctgctcggtgactgagctgatctctctaggaatgacctgtgtgctgatcaagccgacacgtctctttgcttcccgacgtcctgatatggcagcaaagggtggtagaatgaagtcattcctgcaaaagaagctgtgagaggaaatacagatgcagtggctgaatatgaaagtgcttatgttcccaaaggaagaaaatgctaaatctcaattagaggttggaagaaataatgacgcagtcttttt

SEQ ID NO: 2034 - DNA, 758 bp, Homo sapiens
  misc_feature 50, 170, 203, 231, 273, 284, 292, 299, 323, 337, 350, 356,367, 371, 390, 446, 456, 469, 474, 524, 566, 568, 582, 601,604, 623, 634, 654, 672, 676, 677, 684, 687, 704, 713, 724,725, 726, 733: n = A,T,C or G
ggacgttcttgggggggaagcctacccttggccatttaaaaggttcaagnaaaaccttggaaggaaattccttttttggttaaaaaaaaaatgggggaagggaaaaggaccccaattcccatttttccttccaaaccaattttgggaaaaccccaattttgggggatttncccacaatttaagggaaaaaaaatttggtttanaaaagggggccccacaaggaaccccccncgggggaattataagggggaaaagggggaaaattttttttcntttcccctttnggaccccncgccccnaaaaaaggaaacctggggagttcntttttcggcctttngttgcccaaaggncccaanccttggggganaaanaaaaattggggggacccgnttaacccttttttttggttgctttggaaccctttacccaaacccaattttttctanaagggaaaangggaagggggtgnccccncccttcctttttccatttccaaattgggtggggggttggggaagggaaanatttttccaatttgggggggggggggggggggcccttttccngnaaaaaaaaaattgnggaaaagggaaaaaaggtnccntttttaatttgggcccccnctttttgggcncccccccaaaaaaaaaaggnaaaaaattaaatttgggncccnnttttttnccnccgggaaaaaaaagggnaaaaaaggnaaattttaaannngcccttngggggcctttggtttcccccttggg

SEQ ID NO: 2035 - DNA, 240 bp, Homo sapiens
  misc_feature 140: n = A,T,C or G
gatatgatgggtgaaattctagaatccaccctggaccatgaagactctggactatactctcaggatggcagagcagtgagctggaaggagtctggctccttgagaaggatggagcccccacaccacaagtcccggactgnctgctttactattcagccttaacaaagaaggaaatcctgccattggcaacaatgtggatgaacctggaggacactgtgctaaataaaataagccaaacac

SEQ ID NO: 2036 - DNA, 516 bp, Homo sapiens
  misc_feature 6, 20, 22, 30, 36, 40, 45, 46, 49, 51, 52, 53, 55, 70, 73,74, 123, 126, 135, 205, 207, 213, 215, 236, 247, 257, 268,276, 286, 290, 298, 299, 302, 365, 441, 443, 452, 457, 460,466, 470: n = A,T,C or G
aggttncagaaactggaagngnctctctcncacctncaantggcnnggnannncnagaagggggaaattncannacacaagaactctcgctggttgggatcttcagaaatcgttctccttggntcntcaaacgcnaggactactatgctcgccacccatccaaatcgcttgcgcgtaagagggtaatttcctagagcgtaagctnanccattnancattggctacacaccacaaancgccacccggnggggtgatanaattttttggncaattaanattggacttngggnaggaatgnncanctagctcttttacaattaaaaattggttttaggacctccaaatgggcgtgaaagtaaatatanaaaaacgttggccttgggggggcatactaaaaaatttgccctttcgcaatctcataggaagactatcgagcccccntntacgcaagnaactnttngcaaangggncaatttaaagacaccaacggcgacccaattttgggaaggccccctc

SEQ ID NO: 2037 - DNA, 271 bp, Homo sapiens
ccaagaagccttaattaacatctgttaagaactagaagatgcatcccactctttactttttattcctaattctcatccataactgaaaaggttaacatttcaaatgggattacagaatagtgatgtcactttcctatattcatataccaagtcaatgtttaaaaatagcttatgttcaggagaatggcgtgaacccgggaggtggagcttgcagtgagctgagatcgcaccactgcactccagcctgggcgacagagcgagactccatctc

SEQ ID NO: 2038 - DNA, 331 bp, Homo sapiens
ctggtttgccatcccccggtcagcatgaacaacagtaaccatcttgtaaacagtggcaatgtgggctatgcatcttacctgcttgagcaagagaagaacaaaggatatctacctggacaggtgagaatttatatcattgaaagcttcatcttgattcactgagtgtcatcattcatgctgcattcagaagaggtgattcaaatctccagaataaagtgtcatcatcaatctcacatattggtatgctcgaatagacagcatttaccatcctccctaatgtggaaagaaaaataaaaaatgagtactaaccatttgctttttgtgttaaaaa

SEQ ID NO: 2039 - DNA, 111 bp, Homo sapiens
gaccatctttaatcaaactgaattaactggcctgtgcagactgtctttatcctctaagattcagggatactggcctgtgagtttcagcaccgactttctggaactgtaaag

SEQ ID NO: 2040 - DNA, 378 bp, Homo sapiens
  misc_feature 202, 212, 215, 225, 226, 231, 288: n = A,T,C or G
ccaattacttctgactttcaagactcttgtatttcactggcttagggaaaatcaagctaagccctaagtgatggttggatcatccatccagttctttgcttcctctagctgatatccttctttgctgtactatatgggaaaagcaagaaatattgtgacaccaaaagggaggagttttgctcttgtgtgtccagctggagtngcaatgggcngcngatactcagnntcacntgcaaccttctgcctccctggggtttcaagtgatttctcctgccttaccctccctgnagttaagcctgggggaattaacaggggccacccttgcccacccaccgccccccgggctttaaatttttttttggcaatttttttttaaga

SEQ ID NO: 2041 - DNA, 110 bp, Homo sapiens
ggccctgggagagtgggttgagagaatggaagtgaagaggaaggcttcaccatcaccttaactaacatgtgtttcctaccgttaaataaacattataggaggcgcattat

SEQ ID NO: 2042 - DNA, 70 bp, Homo sapiens
gtatattagttcttatatgaatgacacgaagaaacaatgaaattgaaggaaaggaagatgaacgctaagg

SEQ ID NO: 2043 - DNA, 181 bp, Homo sapiens
agagcagagaaggggagaagagaagcatgcagctgaacaccggagagaagtttgactccagagggatggcttgatggtgggacttcaggagaagaataccttcctgctccatcccctttccagctccccttcccactgagagccacttccattggcaataaaatcctcctcagtaaccacc

SEQ ID NO: 2044 - DNA, 342 bp, Homo sapiens
  misc_feature 291, 308, 313: n = A,T,C or G
tcccacagccctgtgaccaaaagactgggagtgtatgtcaggcctctgagaccaagccaagccatcgcatcccccgtgacttgcacgtataccgcccagatggcctgaagtaactgaagaatcacaaaataagtgaatatgccctgccccaccttaactgatgacattccaccacaaaagaagtgtaaatggccagtccttgccttagctgatgacattatcttgtgagagtccttttcctgggcttcatcctggctcaaaaaagcacccccactggagcatctttgcganccccacttctggcccgncaganaacaaaccccccttttgactggaaatttc

SEQ ID NO: 2045 - DNA, 267 bp, Homo sapiens
  misc_feature 139, 162, 172, 179, 192, 251: n = A,T,C or G
aaaccaatttggcccggttggcccctttacccaaaaaaaaacccgggggaaaagggtttaaaaaaagggaaccttttaaaaaggcctttgggaattttccccccaacccgggaaaaaaaggcccaaggttccaaaaggnaattggcccaaggggggggaaanggcaaaaggnggttgantttttggggaagnaaaaacccttttaacccgcaaccttgggccccccctttggcccaaaaaaaaattaattnggtttcccccttcggg

SEQ ID NO: 2046 - DNA, 331 bp, Homo sapiens
agtttcgctcttgttgcccaggctggagtgcaatggcaccatctcggctcaccacaacctccacctccccagttcaagcgattctcctcccttagtagagatggggtttcaccatgttggacaggcttgtctcaaactcctgacctcatgatccgcctgcctcggcctcccaaagtgctgggattacaggcatgagccaccatgccccgcctatctagcaccttttaaaagtctgaatgggaaacatttgccacctattgcctctaagggtggccacctatgagacttcatctacattaataaaactacatacaatttatctacataataa

SEQ ID NO: 2047 - DNA, 330 bp, Homo sapiens
gaaatccctgaaaaaccagatggcacaagttactcagaagaaatgaaaggattttccattattcaaataggaggtggaagaggaagtgtgggagtaattactggattaagatcactgaaagacaagattgtctttaaggaaacagaagactgagaagaaaagaagcttgctcaaggtcacatagagctggaatttaaattcagatctattatactcttaaggactgtggaaggcttttagagcaaaatctgatccagagactgtggatgctggaggagccgtcaaggctggggaaagtaaacatgcacttgtgttcgcaatcaacagaaa

SEQ ID NO: 2048 - DNA, 330 bp, Homo sapiens
tggttttgccgttgttactgctcacctggtttgattcagtggcgtcgcggttggtctctgctacagtccattactcacagtgccagcacatgtttccttaaaaagcttcatcaccatcctcctgcaatgcgaccttcaccggctccccgttgcctgcccaggaggataaagtccaagttctcctgtggaaagaagacccttcacacgctagtcccagcctgtcttcagcccagcccgctgtgtttcctttcctgccttatcctaagacatccttacctttcaatcacactcacttttccgaagcatttttgaaggtattgagggagttct

SEQ ID NO: 2049 - DNA, 338 bp, Homo sapiens
  misc_feature 149, 283: n = A,T,C or G
cttaaataagtggatctctggataagcggcctgactgatgagagaaagagctggcttttcttccgacaatagttgttgtgacctctttgcggcaagaacagtgatagaacagacattatcatcaggagaatcagctcgtaaaagccacnttcttggcacatcaaaggaaaacctggactttgaattctctgtgtgatcccaagtaccagaacagccgcccagcaggggctctggaaatgtgccctgaaagaactcagacaacaggagaccctccttcagcttncagggcttgctggccatttgcacacagaagggagcagccttgtggtttcaaaggg

SEQ ID NO: 2050 - DNA, 237 bp, Homo sapiens
gaagctgtcaaaaatgtttgaaagtcactgcacaaaagaagagtcaccactggtcagttttgcagtactggctaaagcattcagatgccccaagagtcaaaaacacaataacgaaatagtgagactccgactcaaacaacaacaacaacaacaactctcatctttttgcctataaggaattattcttggcctctgttgtacaacttcaagtaaaaggacctaacctacttagaaggg

SEQ ID NO: 2051 - DNA, 331 bp, Homo sapiens
  misc_feature 306, 312: n = A,T,C or G
tcagctacggtgaagctatctaaaccggtggctctatggacccagcaggatgtctgcaagtggttgaagaaacattgtccgaatcagtatcagatctacagtgagtcattcaaacagcatgacataactgggcgagccctgctgagacttactgacaaaaagctcgagcgaatggggattgcccaggagaacctccggcagcacatcttacaacaggtgctccagctgaaggtgcgagaagaagtcagaaatctacagttactcacacaagcattattctgaggggttcttccattaaacaccggntagccnttccaagctgcttgtcctg

SEQ ID NO: 2052 - DNA, 218 bp, Homo sapiens
ctccgcccagggagatggagacagagggccaaagagcaggagatccgctggacactcgccgaagagcgggagatcgctggacactcgccgttggcatcatgtggggtgctccatggcttccaattggccaaattcttttcagtgttaaaatgctgtaaaatataaaacgtatgtaatttcttgacaaaaaataatactatttcaggtttgactctttt

SEQ ID NO: 2053 - DNA, 330 bp, Homo sapiens
  misc_feature 12, 299: n = A,T,C or G
gccaaagaacanggaggaagactgagaaagaacgtgaaggccatctctttcccacaggcccttcgcaggaggctccggactgctccccgcactgcgagatgcctctgtgagccgaggagctgtaaaacacgcagcgggcggcacatgggatgccggatgccaagctgtgtgcatgggacagactgagcaacccaaaggagcctgctgtcccatcaagcacgtggcagtcggggcatcccatggacaatggaaccgtgcattgtgagtccatgtgatgaaccagcgcatcgggagccacntgggtccttcccttcacccgtcatcagtcag

SEQ ID NO: 2054 - DNA, 172 bp, Homo sapiens
gtggcctcagacagaatgacaggcaccagtcccggacaggacacgcacaacacaaaagctatgggaggtagaatcaaaagtaccagagcccaagagccgtggaagatggctctccgattgccttcagacaagcacccttacctgaatgcttgcagaataaacagactgcctg

SEQ ID NO: 2055 - DNA, 336 bp, Homo sapiens
aggagaatacaacgtttgagatggatgagtaatctgctgaagatcactgaatgaatgtgcaaggaaaccataacataaatccatgtctctttctactactcaattttttcctgttactaatatcatttttaaaaataatatttatggggttacaatttatgtttaataagctttacccattttaccacgttatgacccaacaagaaagccttcaccagatgcggccacttgatgttgaacttcccagcctctagaaccacaaggtcagcataatatttttcaaactcatgcatgctcctgcatatatcaatagcctcatttggtttttattgcatg

SEQ ID NO: 2056 - DNA, 332 bp, Homo sapiens
ccaacttcaggactgattgatcatgacttctataaaggagcaggcagcaattagcaggctcttaagttttttacaggagtgggacaacgctggcaaagtcgcaaggagtcacatcctcgacaagttcattgaaaccaaccaaggcaagactgcccctgaactggagcaggagttttcccagggagccagtttgttcctggtacgcttgaccacctcgcttagaatcactgacttacacctatggtcccagctgcttgggaggctgaggagggaggatcacttgggccttggagtttgaagcttgcagtgagctatgatcacaccgctgtgta

SEQ ID NO: 2057 - DNA, 62 bp, Homo sapiens
aaatcatgcccaagttcaaacaacgaagacggaagctaaaagccaaagccgaaagattattc

SEQ ID NO: 2058 - DNA, 332 bp, Homo sapiens
accagctagaggtttatcaattttgggacgtgcctccatctcatctcctcagactcggtgtttcaacaatggctttgctcctcagtcacctctctctggaaggatccctcaatggatgagtacacctgcctctggatggcacatgaagcgtgggggcagaatcaatccacattgctgtctgaatgtagtaccactgctagaagcaggtcaatcaacaaccaggcctacaggaggagggaggaagaagagaggctgctctatgtcctccttttgccccttcccacacacagtaagatgaagatctctttccttgcacccctcagtctcctttg

SEQ ID NO: 2059 - DNA, 308 bp, Homo sapiens
  misc_feature 80, 121, 203, 208, 222, 230, 285, 289, 290: n = A,T,C or G
gaggcagctctcctccagtgcggccttggaaggagatcctacggctgccaccaggcgcatcgcattccctcctctccatncttgatgccagagtcttcccgggtgtgatctgcttatcacncgtcccctctgaggacagctctgaagaccagcttccttgacttgcactgtgagaccagtggctggtctgtttccgttgagtnggggngccctctttgactngaccacantttccttgggcccatttctttttccccttccccctttgaagaaagtctacttggncctnnggggggcagggggggtta

SEQ ID NO: 2060 - DNA, 354 bp, Homo sapiens
  misc_feature 126: n = A,T,C or G
agccagccccacctcccagcctcctcggcaatcagcgtggccgtgcgcctgagttctagccaatgggagaaagtgaaggactccagagcccctggagatggaggatggaggagcctgggttcttgnatcctcacatggaatgccagccacaaattggcatttggactcctatatggacaaggaataaatttaaatcctattaaggctgggtgcagtggctcatggctgtaatcctactgcccttagaagaccaaaagcagggaagatcacttgaggcccaggagtttcaaaaaccaagccttggaccaacattaagtgagaccccgtctctacctaaataaataaataaatcta

SEQ ID NO: 2061 - DNA, 350 bp, Homo sapiens
  misc_feature 245, 274, 294, 328, 336: n = A,T,C or G
ctccaggactctacctctcatcaaggctgaccacgaagcaagatgatggaagccaagagagctcctctgcatgctccactgtctaagctctgctctgcatctgccgtgattcttcttccaaacagaaaacaccgtctttctttttgactacatctgtcctcagagatggtgctgatggatccatttataatttatgtgaatttaaacctttgcaatttttacatggaataaaaggacctattttntggaaagaaaatgctgaacaagagctganaacctgggggccatcttaangcagggggttccttccttacacccctgctgtcanaaagccanctggttggccattt

SEQ ID NO: 2062 - DNA, 193 bp, Homo sapiens
  misc_feature 64, 66, 84, 97, 100, 105, 110, 113, 116, 131, 137, 145, 161,167, 171, 177, 178: n = A,T,C or G
taccacttccgctgtcacggtaaagtccgccatcagcaagactgaaggagttgaaagaccattnanacgctcctttactctttnagacataagtgtntcnattgntaatnaanttntttttccaggccccnccccgngttcattnttgcaaaatggactgngcctcngacntcctcnnaaaatgttcaacctt

SEQ ID NO: 2063 - DNA, 310 bp, Homo sapiens
tttttcgctgtcttcccacctactggttatgtctgattcagttccagcgaccttgaagttggaaggaaagcctctgcccttcagacttcttcatccctgagttgagtttcatggaaaagcagcctctgggagtaacaagtacagatgcagtttcaccatgttagccaggatggtcttgatctcctgaccttgtgatccacctgcctcggcctcccagagttctgagatgacaggtgtgagccactgcacctggccaataattttatttttaaacatgtaagattctatctctgaataattagttaaacct

SEQ ID NO: 2064 - DNA, 317 bp, Homo sapiens
  misc_feature 167, 169, 170, 173, 286: n = A,T,C or G
gatatatgggacacctgcaccggcattggatttggccccgcaacatcttaaagtgccaaaacactatctccaaggcaaatggattccccaggcagatgagaagatcacattactcatgttcaaaatattaccccagttgcacaagtattgtggaattttgtgcattngnnggnagacaactggttctttatcttcttccaatgtcaaaagtaaatttggtgattataactttggcaatatattttaagcagaattagtatattatgtaacatgttttatgaacatnccttattaaaattttgggttatggactcctt

SEQ ID NO: 2065 - DNA, 338 bp, Homo sapiens
  misc_feature 14, 292: n = A,T,C or G
gctgaaacctgcanaggccccacttagtgaatatttccaagaaggagacctgcagtcccccacagaacttcaccattgggctatgcatagtgctgctttattggtaaaacaggaagatccaatttacacctaaccctatttcatgtttggccaacaatgtatccatggaaggacccttcatgtgagattccaactgcattctaaacactcagaggacattctgcatgccctggggtgtaagcactgccatgagatgtaaatcccttgtgaagaacagcaagtaggcagcttnaccttgggcttcaccaccttcatgaagactcctctgaccaacgcct

SEQ ID NO: 2066 - DNA, 464 bp, Homo sapiens
  misc_feature 21, 43, 57, 122, 127, 138, 166, 193, 197, 198, 211, 214,223, 228, 236, 253, 255, 281, 301, 324, 333, 342, 347, 364,369, 376, 378, 387, 396, 399, 418, 440: n = A,T,C or G
tatccgcactatgaaagttcntgaaccaaccgactactttagnaggaaacaaatggncattgatgtccttcacccccgggtaaggcggacagtgcctaagacaagaaaatttccggggaaanaactngcccaaaaatngttacaaaggacccaccacccggtatgntcatcttttgtattttggggatttcanaaanntcatttttttggntgngggggggcnaaagnacaaaacnttgggcttttttgggcnantgaattttttattggaatttcccccntggggattttatttgcccanaaaaggaaaaaaaaattggaaanccccccaanaaaccattntgaancttttggccaaagaaanaattngggcccntngttttttgngatggaaanggnaaaaaaaagggaccccttnccaatgtaaaaaaaggcccaanccccgaaaaaggggggaacccgcc

SEQ ID NO: 2067 - DNA, 358 bp, Homo sapiens
  misc_feature 303: n = A,T,C or G
tctccctctgttgcccaggctggagtgtagtggcgtgatctcggctcaatacaacctccgcctcctgggttcaagcgattatcctgcctcagccgccccagtatctgggattacagcaggtacctgctacttctcatgcttcattgtaagaacaagatctgggtccagctcaacaaatacttgaacaaagaatgaagtaagcagaccagtgtaaagagaatgcctcatacaaagttcagaggcccaggagatagaagctggtaaaaccattcaccaagaagccaagccgtggaaaaaaaggangggtgccccaccagggaaatgactgcatgcaaacagagcttggttatagtggggc

SEQ ID NO: 2068 - DNA, 348 bp, Homo sapiens
  misc_feature 5, 12, 36, 55, 93, 99, 147, 195, 197, 227, 248, 312, 323,330, 335: n = A,T,C or G
ggccncctgtanaaggaatgaaaaaacacacaccanccccttttaggcacctcgnaaaatgactaacatccaaaggcatagaaattgacagcnaatacncaataaaacaggaactcccagatcgaatgcccacgtggaaaagtcatngagagagaaactgactcaaagcatccgctgtgttccggggccatttgngngggcaggatgggggttaccgaggagtgttntggggccatgagcacgggcgngcgggtgatcctcacctcccaactggggtgccttcaaaaactttagtaaacctccctgtgactncgcttcctcgngaacacngtggntgcgggaggattc

SEQ ID NO: 2069 - DNA, 360 bp, Homo sapiens
  misc_feature 270, 299, 322: n = A,T,C or G
ttcttcgtagactctggaatggagctggaagctgtcatcctcagcacactaacgcaggaacagaaaaccaagcactgcatgttcccacttataagtgagagctgaacgagcagaacacatggacatatgaaggggaacaacacactctggggcctgtgaggtgcagggagagcatcaagaagaacagctggtgggtgctgggcttaatacctgggtgatgggttgatcttgtgcggcaaaccaccatggcacacatttacctatgtaacnaaccttgacatcctgcacattgtaccccnggactttaaaaataaaagttggncaaaaagaaaaccttaacttacttttaaaaaaaaaggt

SEQ ID NO: 2070 - DNA, 314 bp, Homo sapiens
ggtgagaaccactacaggacaaaaatgagctccttttttccagtctcagcccaggagggatcttcacagagaaagcaagcccagcccatccccacagctggctccctggtgcccattctgaaaggctggacccatcctgacctgtccctgccccaaggactgcctggtgagggatggcttaccaacactgtgactcagtccttccaacatgcccaacaggtcaattctgggatattccttacaggaattaatgagagcacattgccggtaatgttggcattaataaaataacatttaaatttaaaaattccttt

SEQ ID NO: 2071 - DNA, 363 bp, Homo sapiens
ctccccattatggctccgcaaccaggtggcgctaaagagagaccctggaaggatgcgggaggaagcggagacctgctgtgtgcttgctgtggccctaagcttggcagttggaccctcagtcggccccagtctcccgctgtgtgtcaccccgtacttccagaaccagcctcatcttgcccctcagaggtacctgctccagcctggtgacactccctccgaacaagttctaatctcaccctcccatttgacccccaagccccaggggtacaggcttcctgataccttaagggcctccctttctgcctttctggtttttggtaaccagcaaacagttatttctattaaattctctccatcattgtg

SEQ ID NO: 2072 - DNA, 278 bp, Homo sapiens
  misc_feature 208: n = A,T,C or G
gcttgatgcagggcagcagggcgatcttggaagctccatattgaagatggtggagccacagtttgaaaggagtctgggttggaggagagctacaggcggatcaggaacacccatcttggatttgacctgagtgaaaaataaactgcaatcattatgttaaaacacttgcatatttggggggattttttgtttatcttgtgaaaatgcncattaacctctattgtcataataaaaatccttaaagttggtgctaaaaataaacgcaattttgaaaattc

SEQ ID NO: 2073 - DNA, 85 bp, Homo sapiens
aaacaccaaccattgaggttgagaccatttccagaggaagaagcatggggccatcatttattaaaatttatgaaatgttttgcgt

SEQ ID NO: 2074 - DNA, 320 bp, Homo sapiens
  misc_feature 290, 292, 295, 298, 301: n = A,T,C or G
ttcttcatctgctgactatgaaacgattctagattgtttgccaactaaatgtgatgctttcccaatcaactacggcaggccagatggcactttcacttctacgggctccctctgtggtgggtaaacgtgcagagaagactggaacactgtcttccaggagcctaggttacactgatcccagcacagcacttcctaccaagtaaagatcaattttaaaaatgaatgaagtcaactgaaaaagctcccaatggccaaagctggaacaatttgagcaaagaataaaggtatgntnggnttntancccagaagacaaaataaat

SEQ ID NO: 2075 - DNA, 652 bp, Homo sapiens
  misc_feature 48, 52, 59, 61, 78, 81, 103, 154, 186, 212, 235, 247, 312,380, 489, 493, 501, 512, 516, 521, 542, 550, 570, 578, 614,629: n = A,T,C or G
aatagaggaaagccttccttccggaaaagagcccctttccttcttggngccncaagccngngaacaacttccctaatnctngcccatccccttcaagccaatngcttaatccaacttcaaagccttttcttcccaacaaaacaattcccccttngcttcaaagccaaaacttaactggggtttttngtggggggccaacaaccaagaaaagngtggcccccaaaagccccccctngttggcggaagnaaaaaaggggttccttgggccaagccccaaaagttggccttttttggaccaattggccccaagtnggttcccccttggggaatggggggaaggaataacccccaaacccaccaaattcccaacccccccaagngggaaggggttgggggtaaccaaaatttaaccaaaacccttgggggggaaggaaccttgggggggggaattggaaaccccggggtttttcctttccccttttttccccngggnaaaggccnttttttccccngggnaaaanttggggggccaatttgggttnggggggcntttttttttcccccttgggngggggaangggggaaaaaaacccttggggggggggggaaaaagnaaaaaaccccccaangggggggggggaaggaggattgg

SEQ ID NO: 2076 - DNA, 314 bp, Homo sapiens
  misc_feature 294, 300: n = A,T,C or G
ggcaaggctgtgctttaatcatcttcgtaacccaagtgctgatcagcgaaccaaatacacacagaaataccttgcgccctggttgcttttctgtgctagaatcactccagacttcaatcatcagcctgctacaagccactcccaagcctgggacttaatcgccagcagaaagcacgtccacacgtcctctgttacctcctctagatgctaaggaatgtgactccaagaagattcaaatagcaggatcctacagcgttctgccatcatcttattcaacaaaagtcttttggtttnacaaanacccattcatattt

SEQ ID NO: 2077 - DNA, 328 bp, Homo sapiens
  misc_feature 14, 294, 300, 311: n = A,T,C or G
actgagaaaccgangctcaaaaaggctgaggaatttgcctaagatcacacagagaaacgggaagctgttggggccatgctgttggggccagagcctacgtatgcactgcctccagtgtgcatggggagaaagcaacccacatcgactgctgcaatgagacagctgcttttcctgtgtttgggcaccgaatcatctcatcagccccactgtgcaagttttctcctctccatctcaaagatgtgggcaccgagcctcccatggaataagtaatttccctggggtcacacaacttanctaagnggcagcccctnggatccaaattgtaaag

SEQ ID NO: 2078 - DNA, 324 bp, Homo sapiens
  misc_feature 283: n = A,T,C or G
ggtaaaacaccctcaaggatgggcactgcacaagactgtaacaacaaggaacgtggctttgcatcctcccagcaacaaagtctaccacggatcccaccccactctgatttcggctcagccgagaacttgaaataacgggcccactgcctctgctccacgaggatccatgccatcatggcactttgggaggcctgtcacgagttacacaggcctaggctgcccacaccccagctcagcagaaaaagagaactgcaatccaagtcagacagatcctgcctgggcntttccgcaaaaagcctggagagtctgaccagcaaagaaaca

SEQ ID NO: 2079 - DNA, 238 bp, Homo sapiens
gttctgttttaaaattcttccagtgtccagttgccaatgggattaaaaggaaaacgatgaggaaaaagttatctgaggtcaatctgcaatggaatatgttcctttcctgcctgcttagatgtcttctgatagtcacgaattgatttgtagtcatacttctgtaatatctatatgcatgtgaagcactgtctgatgttaaaatataaacatcatctatagtaataaactgagacactgc

SEQ ID NO: 2080 - DNA, 427 bp, Homo sapiens
  misc_feature 229, 231, 264, 335, 338, 340, 364: n = A,T,C or G
gaactagagagtggtgtacacaatccctagcagtactgaccctgcttgttggacttaaccctgaagtcacaggtaatgttatttaggaaaagtatctctgcaatacacatactcttttagtacaggtagtaggagctagttaggcttagagcagtcctacctcttagccatcagtacaccaaccaagaaccatctttaccataggaagaggaaagaaagagccaagagngnaagcctagtctagagtctagagtaggattaatntaccaagccataggggattttattcctagtagccaccaagttttcctccaaaaaggaaatccaagtttagngtngnggaaaaggaaatttcaaattttgnggcttattttgccccatttggtaaattccaaccaccttttttccccaattttaattctccaat

SEQ ID NO: 2081 - DNA, 459 bp, Homo sapiens
  misc_feature 407, 419, 431, 436, 438: n = A,T,C or G
gtgggatgcctccatgagctccaacaggcagcctcgccggcctcccagctctgctcagttgctcagcaccccatggagaaggtgaagcccataatgaacacactgccctggccacttacttcctccaaccaaagaagccctcatctcccgggcctagaccatttccggagaccagcttgtgacagagccacaacctccggtcactctgtcagctatctgcagttcctcctttttcctttcctctctcccctcataaacaatgactgttgatgtttccactagctacagatgctgatgccaagattagctttggtcaagatgatattctccatcctccaaaacaatgaccaaaatgttttattttatggctaggaactttactttctttcatatgaaatatttaatgnatttttcactgngctcatttttgntttgngnggggataggtaatagcaaaac

SEQ ID NO: 2082 - DNA, 433 bp, Homo sapiens
gagatggggaaacgaatccagaggttaatgatatgtccaccataactcaactatcaagatcctcaagtcagtgctctttccttcatgtcctcaggagttctccagggacactgtaaagatgagaaggaggttgcacggtctgaatgtttgtgtccttccaaaattcacatgttaacactgaatcctcaatgtgatagtgttaagaggtggggccgctgggaagggattagatcatgaggacagagccctaatgactgggattagtacccttataaatgaggccccagagagctgtcccttccaccatgtgaggattcagtgagaaggtgctgctgatgaaccagaaagcaggccctcatcagagaaaggatttgccagcaccctgatcttggactttccagcctccagaaccatagtaaatatacttctgttg

SEQ ID NO: 2083 - DNA, 525 bp, Homo sapiens
  misc_feature 10, 442, 447, 452, 459, 475, 494, 498, 502: n = A,T,C or G
ggtctctctntgttgcccaggctggagtgcagtggtgcgatcatggctcactacagcctcgacctcctggttcaagtgattctcccgcctcagcctcccaagtagctgggacttcaggcacacaccaccatgcctggctaatttctgcattttttatagatacagggttttgccgtgttgcagactgatctcaactcctgaactcaagcgatcctcttgcctcagcctcccaaaccgctgggattacaggcatgaaccactgagcccagctgcctttcacacttctactgtgcattagaatcacccaaagagcttgttaagacagattcccaggctgcaatcttggaggcctactggcttagtagctctgggctgaggcctgagaatatgcattcctaagaaacctcaggtgaggctgatgctgctgtgtgtggactgctangctangacangggtttnttttttcctaaaaaangggttaaattttttgaccncaantttnttatagggtatttttaaaaggga

SEQ ID NO: 2084 - DNA, 524 bp, Homo sapiens
  misc_feature 431, 433, 434, 444, 455, 456, 473, 477, 479, 480, 487, 490,491, 495, 499: n = A,T,C or G
atgtaattaaggatcttgagatgagatcatcctggatgacccaggtgggccctaaatccaatgagaagtgcccctataagagaaagacgaggagaagacacagacgcagagaaggcgacgtgaaaatggaggtggacattgaagtgacgcagtcacaaaccaaggaatacctggagccactggaagctgaaagatgcaaggaaggattctctccttgagcctttggagagaatccggctctgccgacaccttgatatcgggctgctggcttccaaaacatgagagcatatatttctgttgttttcagcccccaagtttgtagggattggttacagctgccccaggaacataatacatgattgaagaccagcttttaatgtacaaaccctagtacaaggcactgcaaacctcagagatcttcacacaaaaangnnattttaaccnctttaaaaggnnaaaaatcttttttcccncccntnnaaagggnttnncccnaggnccttgaggggttataatataagagg

SEQ ID NO: 2085 - DNA, 551 bp, Homo sapiens
  misc_feature 374, 425, 436, 446, 449, 452, 462, 485, 498, 511, 512, 537,538: n = A,T,C or G
atgcctggtcatcctcaacctggtggacacgccttcattcactggagaagcagcagcagggcttgcttcgagtccagggaagcaagaaaacagatctgatccccctgtggagtgtggagtaggggcactgcccttgatggtgggagtgaaaccaacttgtttgcagataagattgccgagacaattccaatggggaaaagaagtctttccaaacatgctgctgggacaactggatctctacatgcaaaagaatgaacttgaactactatttcacactatattaaaacaattatcaattattttgtgactgaaggcaattaagaagcagcaaatggaaaaagctctcgctgtcttccccttttctgcctcaaggnaggatataaattctcgtttactggacacaactctagactctattcaccccnagaaagcaccncaaaaatatnttnacnaacgcttttntttttttttccccccccaataangtttttcccccantggtttccccccnnaaaggaaaagggcttcctttggccnngcattttttttaa

SEQ ID NO: 2086 - DNA, 500 bp, Homo sapiens
  misc_feature 20, 168, 285, 312, 314, 369, 371, 372, 382, 386, 388, 399: n = A,T,C or G
gtgaaattcatcttagcttntgggattggctcctactcaacatgcaagcactaatcctctaacatgcagagacagagtctcactctgttgccaggctggagtgcaataatgccatctcgactcgccgcaacctccacctcccgggttccagtggttttcctgcatcancctcccaagtagctgggactacaggcacgtgccaccacgcccagctaatttttgtatttttaggggggacagagtttcaccatgttggccaagatggtcttgatctcttgaccttgngatccgcccacctcagcttcccaaagngntgggattacaggcatgagccactgcgcccagcccatacataagaattttaagtcncnncatgcctccnttantnaaaaaaccttnttaggaaaagagaatcagattttttcgttggagtgcttacaatggatgaatccttttagcatcattatctcattttaatttgcaagccaatttttaagaaa

SEQ ID NO: 2087 - DNA, 526 bp, Homo sapiens
  misc_feature 415, 437, 443, 444, 454, 466, 474, 490, 498, 506: n = A,T,C or G
gaagtcagagattggaagcaccattgtttgcttcaggatggagggggcttcctgacaaggactgtgggggacctctaggagctgagagcagcccccacctgagaaccagcaagaaaatagagaataagcctggaagcaacttttcccccaaagcctccagacaagacctcagcctgaccaacgccttgacttcagcttggtgatatcctgggcagagaactgagccatggcttgtcatgccagcattctgacctacacaactgtgagccagtaaacaggtgaaccagtgcttgattagctacgtttcctgtttctgcattggtgatcatggaaacaaatgctgagaaggagcctctgctgcctgggtaccgtgaatgaccacggtgaacaagagggctcagtaaggaaccctgcngactgggtttaactactgtagngggggnngacaatcttnttttttaaaaangggggacntttggggaaaaaaaantttccccnttgggggntggaaaaaaaacccacccag

SEQ ID NO: 2088 - DNA, 521 bp, Homo sapiens
  misc_feature 427, 429, 449, 455, 459, 465, 501: n = A,T,C or G
tgttggcatgaatgaaatataggatgactcatccaatgagaatttgaatgctggcgtaaaaccatagagaaaatccaggttcaataaaaaggctaataattcacagaaatatcctgggatcaaagagaagaccctgtggcctcattggacattagtaggtgccttggaagaagcagaggcaggagacacaaaggacttcaagtgattggaacaagaactgtagaagacatacctaagcacaggagaggggaaagagagcgttcaattgcttttgaaatgagtatttaaaaaccagcctcactcagggtggccccttgcagtcctctgctgagtcaactctctgcttggcagcctcttgtccatagctgactcagggcagaaaggtgattgattgccttaagagccttcccctgacctctcactcggntnttctttcttcccccaccttntttcanaagncccctntaaaacccaagggtttttccaaaaggccttttttcntttgcaaaaacaaaaccagt

SEQ ID NO: 2089 - DNA, 392 bp, Homo sapiens
  misc_feature 60, 185: n = A,T,C or G
ggagaagacgggggtgaatgaaggcccgagaatctccagggaagctctgctctccacctntgcctgtccccagacccggtgtggaatcagtgctcccaggttcttctggttaatacaacagagcaaatccctgaaggctgccgctaaaaggcagaaaccattactttccaactatctgatacggnttggctgtgtccccatccaaatctcatcttgaattgtaactcccgtgattcccacccccaccccaaaatctggccattaaactggccccaaaactggccataaaaaaaactctctgcagcactgtgacatgttcatgatggcatgacgcccatgctggaaggttgtgggtgtaccggaatgagggcaaggaacaccaagcccaccca

SEQ ID NO: 2090 - DNA, 460 bp, Homo sapiens
  misc_feature 230, 356, 363, 367, 376, 398, 420, 442, 446, 447: n = A,T,C or G
gtttttcagacttcctgacatggcaactggcttcaaagagagcggaaatggaagttgccagcgttcttaagacgttgatgtttttcaagttcattttgaaattcccttctctttctttattcaagaagatcaacacacagctaatcatcaccacaaagagtactgcaatcaatataagaatacctaccctccctggtacaagccaaggctggcttcccaggaatcctcanggtttgccagcctttgtgcctgtgccccacttccctcttgaggtgtggtcttggactgaaagggcgtgacctctttggatccactttggaaatcctccagcttcttgcaattggttttattaaaanaccattntgcnttcttgggnaaaatttaatggccttctcttntttgaactttggaaattctttnattgaaaaaaaaaaataaaaancccnngggtttttttggg

SEQ ID NO: 2091 - DNA, 466 bp, Homo sapiens
  misc_feature 386, 396, 403, 423, 436, 441: n = A,T,C or G
gatctatacctggaaatacatatacctaggaataactgctcagtcacatgttaacaagccttttccaccttcttggacatctctgaccaagccgtcttaccaggcttaccatgatgaataagcaaaggcatcacagaaagggaaaattaacagttccatcttcaaggggcatgtgtgtgtgtgagtgcccatgcagatacacatgtgctacaagatgaagtagaagaataattctcacatgaaggcaaatcagggatgaaaagaagctacctctacacaacaaggtgaaaatctaagggcctcgagtaatgtgccccctcccaaagcattattattctaagggcagaactgaactattaggattacattttcaatccaaaatttgnaattaaatgnaatgggnattttaaaaaatgaattaangggcccggaaaangggtnggtttcacaaaacattaaatcactt

SEQ ID NO: 2092 - DNA, 347 bp, Homo sapiens
  misc_feature 136: n = A,T,C or G
gaaaggagaactacttggattccttgagtgtctgaagttcatcatgccacatttcccagtgtaaatttttttgaggaggtgtctccatgcttggcatgaaaaccaggggaggaaaatacaagatgccctactgtgnacagtgaagtggggttttggaagatgtgctccagagaacggcgtctgggcccccacaatctccccatgttgcacagactctctctgactcctgtgatctggccctggctgtcctggaatactaccctctactccaacagaatttttaattgttccacagtgtatttatgtacattgttatctgagcctctgagtaaagcaaaacaggcatg

SEQ ID NO: 2093 - DNA, 366 bp, Homo sapiens
  misc_feature 81: n = A,T,C or G
gtgctgcctgtggttggaggcaaaatcctggatttcctcaatggcttggagttggagggctgttcctgtggttgtgatttnaacccaagtgctagtagaattgagcacttagtttcctggttatgttatcaaaccgaaattcggattggcctccctaggtccctatatttgacaatggccacactgtgctgccaggaacagacactggaaatatcagtgcctcctttcactctccaatccactagcatacaagctccatggggccaggggtttttatctgttttgttcactgctgtgtcttcaagtgtctataacattgcctgacatcgtaaatgctcaataaatctttcatgactgaatgactcc

SEQ ID NO: 2094 - DNA, 527 bp, Homo sapiens
  misc_feature 414, 421, 423, 429, 432, 439, 441, 450, 454, 455, 463, 483: n = A,T,C or G
ttgaatacaaggatgtggtcaactatactgttcttaccgttgaaaaagaggtgctgaggccaggcatggtggctcacacctgtaatcccagcactttgggatgccgaggcagctggatcacttgtggtcaagagttcaagaccagattgggcgacatgatgaaaccccgtctctactacaaatacgaaaattagccattgtggtggcacacgcctgtaatcccagctactcaggaggctgatgtgggagaactgaaccctggaggtggagattgcagtgagccaagatggcgctactgtgctccagcctgggcaacaaagcaacactatgttttaaataaataaataagtgctgagatctcaagaaaatacaatgcctagcttcagaataccatatattatatattcatatggntataaangnatcccnccntggtttntntgcttaaangaanngactttcnttttatagtgatgccaggcnctgctctaagaattttatgtatcctaacttattaaatctcctca

SEQ ID NO: 2095 - DNA, 544 bp, Homo sapiens
  misc_feature 408, 433, 436, 437, 439, 442, 445, 453, 474, 479, 481, 519: n = A,T,C or G
aaaattctggttctcaatgacaccagcatcattactgatttgctttctactcacacacaaatagcctccaaataagaatgccaacactatcaccaaaaaggaaaaattatcttcgtttccccaaggcctgcagctttgataagaaggcaggagtttttggaggagagcgtcgtgttcgtctgtctgtagaccctgagacactgatttacagcaagactcacggtgacaagaatataaacatctcttcaattcatttgatgaggaagaaaagctttgataaagaaacttgacaagaactttacaaggaagaaaaattaccaacaatttctcctatcaatgtagatgaaaaattctaaacaaaatgtgagcaaaatgaatttcattttatgttaatagggattatccttntgatgaaatccaggtttttttacanttnncnganatngggttggnttttttcaaaattcattgaantttgntnccttttgtagagcacctaaatttttaaaaaaccccccngtttccacccaacttgggaaaagct

SEQ ID NO: 2096 - DNA, 396 bp, Homo sapiens
  misc_feature 17, 93, 190, 194, 209, 232, 273, 300, 302, 316, 330, 335,347, 356, 376, 383: n = A,T,C or G
agtcttgctctgacgtnaggctggagtgcagtggcgcgatcttggctcaccgcaacattctgactccctggttcaagtagattctcctgcctnagccccccgagtaagctgggattacagtcatgcgccaccacgcccagttaatttttagtagagacagcgtttcaccacgttggccaggacagtctcnatcncctgacctcatgatncacccacctcagtctcccaaagngctgggattacaggcgttagccacgtgcccaagcctaaagntttctaatatatgccaaaggaaaagtncnaaaactaatcactnttaaagacaatacncgatnatattttcatgnttataatantacctttataatctacaatngtttttntggaaaaatttgg

SEQ ID NO: 2097 - DNA, 373 bp, Homo sapiens
ctgtgtagtattcaattttatggatgtaccataatttacttatccagtcccctgttaatggacatttggattgtttatgatattctgctctcgcaagacttcagtgaacatccctgaatatggatggccatttcaagcatgggcgagtttataccaaggagttgaattgctgcgtctgagggcatgtgcttttggagatgatacagactgccctccacagacagggaaccaattttcactcccggcaataatgtctagaacgtgagccattcgtgtgatgaccgaggttactgtatatttgagcattcaatgtatgctggcactgtgcatcccctcgttatgaccctggaaatcaaaattaaaatcccacttt

SEQ ID NO: 2098 - DNA, 352 bp, Homo sapiens
gttttccactctgcttcaagcctcttccagatgcaggagtctaacagagtccacataaacaagaaaccaaaacaaaacggcacaaggtcgaaagctttccccttgtgatacaaccactttatgtgcagagaggcgctcacatgatgctgccaacatgtgttttctgtctcagatttcccttgataacaaaggacatattttagaaggcgtggccctaggtgcatttggccagcaggaatccgagtggagtttggggatttcatttgggtttaggctgatcccctcgggtgcccagtgctacagcccttgatgatgttaaaccccaattaataaagttgttaggaacactttg

SEQ ID NO: 2099 - DNA, 352 bp, Homo sapiens
  misc_feature 238: n = A,T,C or G
gtctgtttcctggttacccaaattccaggcactggccccaggcccaccacaacgcatccctcaaagtctctttggcagaggaaaagcatttctccttgctgcggcaagtcagagccagaatctcgggttctcctgctccaaagcccccactacaccctcattcgcgtgtgattcatgcgtttaggtggttctgctcagcgtcgttttttgagttggggggcggtgagtaagcacaatntaagtttccttcatttctcttctccttgtttgagctaaggaattactttcttgtaccaaacattacacccttggaaaacactccagatggttctcattaaaattccaattcctt

SEQ ID NO: 2100 - DNA, 184 bp, Homo sapiens
gggtttgagtgcctgcacttggtgctgggcacggctgagccatcccagacgccaaggagtttacagtctagtccagtcagtgacgaggttaaaacgaattctcgcatcattgctactgcgaatgcaccgggacaggatcagcccttcaaattctcccacgtggtccctgcaggtcttctccaag

SEQ ID NO: 2101 - DNA, 447 bp, Homo sapiens
  misc_feature 372, 394: n = A,T,C or G
gcaacagaaacaatctttgtccaaccagcaaaagagggatttggagaaagaaaatgaagcagcttatggaacagaagaatgcagatgtgacggttgatagaccagctgctatattggactatgaagacaagggtcacccctctggatcggacagtgtggagttagaagaagcctcagctccctgaggattttgtggagtacatccataccagcccatacaggctgactgcagacattaattttatgtcatgcccctggaagctgagcccagttcaaatggctgctatctttctatctactgtgtagagaatactggagggacaagagtgaaaatagggataatctctatttcatacataagaacccttgaancctgaaaaagttaaatgaagtncattaggattgggggtaaaagtactggctttaaagttaagtaaaccttgtctc

SEQ ID NO: 2102 - DNA, 636 bp, Homo sapiens
  misc_feature 571, 606: n = A,T,C or G
gaaactcctgcccgaacttgggtgaaaggcaccggaagatgccttcggggaaaatggcggcgctgctaccgcaccgcctttgcctggaacacaggcagcttccagctatcgattttattgaccggagcgccatgccggcttcctaacctctttgccctcaagtgtaatggcgctgcgattgggcttcacgccgtcttttttcccctccccaatacgcgcgttcattggacgagagccgaagatcgagcgttctgattgggtgctagcaaaggcggtccgtttgaacgaagccaagagctgcataagggcaggaagctggactgctaggatcaggcgactacaaggagttgtgaagcgacttgcaccgacctgggggcagcaagaggccccggggctgctttccgctgttcgactctggcaggctcagccaatcacttgaaggagggaaccgatttgagcgatggagccactctggccgagttagagctgagattatcctgagttccttttactggtgttctcagagcatccttgactttggagaatgggtatcttctttgtttgcctttangggagggaattatggttagcattttctgggggcangcgccatgcccagcatattacatatttcat

SEQ ID NO: 2103 - DNA, 473 bp, Homo sapiens
  misc_feature 425: n = A,T,C or G
gtggggtctttcaacttttagcccaagatgatggaagtttccaagaaccaacagaaatatctggaaacccattttcagacatgtcctgaacactgaattataactaaaacaaaacctttgtgatttcaaggtcatggaaacagtggaactgaccccactctgtccagctccaaaggccatgctcttttcaggacatgccttcactagatgatctcttcagccccctcccgactctgattttgagtcctctggaattgtctcggatgttcaaggcttacctcactctcataagctcagcctgttttttgtttatcgtagcgtggcctttctttacattccaactgcagacctggttgtcattctccctgtgacatagcatttgatgtccactgggttctagttatgtctatataagtacaaacagncccatttctttttttccgatccatctcccttatcttaataaaaaggtg

SEQ ID NO: 2104 - DNA, 176 bp, Homo sapiens
acacccatgaggtataaacactgttgtcagaggaaacagtggaaatgaggaggctgcccttgtcttagagaacctatcaggaaatgctttcctgaatagaaagtatccttatccattgttcagcgtccaatttcccctttgttccctgtttaataacaatagcaaaccttaatttc

SEQ ID NO: 2105 - DNA, 578 bp, Homo sapiens
  misc_feature 286, 407, 448, 450: n = A,T,C or G
gttttatgataccacaaagagatcatctttgttctcctcacctcaagaacagatgggtagcaggggtggtggctccatgactcactacctcctcacgcccgcaaagactgtctaagcagcaggcaaacttctgggatcaatagggttcatggcaacgcagtgtctgccagcaaaccttggaggaggccattagtcaactggtgacctgccaccctgaccactgcagccctctgatgcagattctcagaaaggttagctggtgctgggaaacttaaaaggtcatggntatctcggagtcaaaactccacagaaccagagtgaagagtactgcagaggagctacaaagtcagaggtaagggccacattggaggccaaagtcaccacctgatagctgtgtgaccaagaanagctaagcagaagaactgcgatgtgtcacatgcaatagaananggccaaccactgggaatggctgcctttcaagaacactgaaataaatgacctctaaatggatgacaataatggcatgaggtcagatgtccaactgagatccagaagcaggtcccaagtcaataactttc

SEQ ID NO: 2106 - DNA, 494 bp, Homo sapiens
gctggagtgcagtggcgcaatctcggctcaccgcaagctccgcctcaccgcaagctccgcctcaccgcaagctccgcctccctgcaagctccgcctcaccgcaagctccgcctcccgggttcacgccattctgctgcctcagcttcccggatagctgggactacaggtgcccgccaccacgcccggctaacttttgtatttttagtagagacgaggtttcaccttgttagccaggaaggtcttgatttcctgacctcgtgatccgcctgcctcggcctcccaaagtgctgggataaaggcaaatgttttaaccaaaaggagtaactctgtaagggttccatgtgagacactgtggtatcttgtaggtggaaaaaactttacgatatgagaagaataagctgcgaattcttcttcttttcacattaccaaagatacatggtttctctcttattttaataagtcttattttaataataaaattgtaattgcaagcc

SEQ ID NO: 2107 - DNA, 447 bp, Homo sapiens
  misc_feature 406: n = A,T,C or G
ggcaaaatctttttcccttgaagactggaaatattatccatgttgtcctccggaatattttcaatgacttgtgccctgccagctctagcttttgaagggtctacactcatcatcaacagattctgggggttcatgcacagatttcttacctgggtatattgtgtgatgctgagctttggagttcaactgatttcatcacccagcaaccagcccaggaagccagcccattatccagaggaaccaaccaaggaagccagcctgctctctagaagctagacttgtaggaagccagaccactgtctctagcaactgatccaggaagacagaaaagaacacctcaataacaggaccaaagtggccaggacttgactggatgaagtaactgacagcttccctaatttttggncctacttccaacagaagaacaaccagagaaagccaagtatg

SEQ ID NO: 2108 - DNA, 668 bp, Homo sapiens
  misc_feature 523, 607, 636, 638: n = A,T,C or G
atggagtcttcctctgtcatccaggctggattgcagtggcaggatctcggcttactacaacctccgcctcccgagttcgagtgattctcctgcctcagtctctggagtagctgggaatacaggcacccaccttcgtgcccagctaattttttgtttgtatttttgtagagaccgggtttcaccatgttggccactctggtcttgaactcctgacctcaggtgatccgcccacctctgcctcccaaagtgctgggatgacaggcttcagccaccgtgcccagccaagatcaagttgttgttggcagggctgcactccctgcaaaggctgtaggagacaacccatctttgcttcttccagcttctaggggcttccgcagcatgccttggcgtgccttggcttgtggctgcattactccaatctctggctgtatggcaaattacctcctcctggtccatctatctccctgtgtgtcacttataaggacagttatcattggatttaatgccctcctggatgacccangatgatctcatctcaagatccttaacttaaagtacaccacaaaagtcccttttgccaaatgaaataacactcaccatttccgangataaagacttggatacatcttttgggangncaccattcaacacactacactaataaatat

SEQ ID NO: 2109 - DNA, 270 bp, Homo sapiens
gcaagaatgatcatgctattatattcaccgagtctaaaagttattgcaaacgaaaggatagcctcaccatcattcccagagatactactcagcaaaacagcccttactgagaatgagaatcaacccctggaaatctccaaaaggacagactcctaaagctgccaacagggattcaccaagaacatcactgcagatctctgcagtcggtttcatcaaatattcaacaaagcacggctttcaaaatcaaataaaaaagctttggttacagct

SEQ ID NO: 2110 - DNA, 193 bp, Homo sapiens
  misc_feature 83, 84, 103, 114, 157: n = A,T,C or G
gcaatggatgctgcttctcctcaagaaacagcacatgcacagaaacaaaacatcccagaggtttcactccctcaggaccagcnnagaccacagactaaaattntaacctggacnaaaagaggattcaccaatgcaatttttgagaactaaagtcttnaaaaattaaattttacagaagactacagagcatctt

SEQ ID NO: 2111 - DNA, 599 bp, Homo sapiens
  misc_feature 26, 60, 68, 109, 122, 126, 129, 144, 159, 241: n = A,T,C or G
tctgggggctcctgcattaagtcaanaactgaagggctgctggggcgaaaaacaaagggnggactctnaactttttggcttggaaagggggaaccctcggggctggggnaccaaagcttgcngganttngtttgacctgaggcncagggatggggcttngggctcccaaaagttcttcctggctgggaatcattggctggccaaggctctgcgtcccatccctggtccctcttccctgcangctcctcggacttgctttcttctcctgacgctgtcaagctgtactccaaaaatgttcttgctggcaaaagttggcgattaagctcttggatgcaaaagaaaccgtcctctgcatgctcccgcccttcttccaaacgtcgtccctttccagaagaaactcgaggaaccctcaagtgctcaagaagaagctccggtgacgaaggcactgagcccgatcccactgtcctcaagacttcaagaaggggggaaaacgaaagcattcttcgtcaccggggaatcactggctttgtttccaaaattattttggccggtttcaccttttactgggactctgtaaaaaataaaaagatgtgaattgg

SEQ ID NO: 2112 - DNA, 660 bp, Homo sapiens
  misc_feature 31, 325, 583, 607, 610, 635, 637, 642: n = A,T,C or G
gctgccaggaagcatgctggggaggcctcangaaacttacaatcatggtggaagatgaagaggaagcaagcacgtcttaccatggcagagaagggagagagcacgaaggaggaagcactacacattttgaaacaaccagatgtcggataaacagaaaccaacacttttgaaagacttgctctgctgccgatatccaccagcctcctgatacccaccctccattctgcagttttaacacagcaccagaccagcattcctttttgataagagaccactggccatgggatggttctgttcagtctgcagagctgcacacagagggtcntcgtgcccctgcttcaccttttgacgtatagggcctaactgtaacacatttaaaggtttctccctctccatcacaaagggaacatgggacgtgtgtaacatacatgctggcttactatgcatgtgcccatctccctcttgtgaatattcatagctcctcctatagcctgctgaataggtacacttaacccaccccttcagcacaaattcctgtctcgtaacctcctcctaaaaggattgcttttctgttcaactggangctccactttctggttgaaggcgnggnacccttcttttaaaaaaaaaccctncnttctnaaattatagaatttggga

SEQ ID NO: 2113 - DNA, 394 bp, Homo sapiens
tgttccaagcttcacatcaattcctgacaagggtgacagccagagggcagacagtcacagaccatagcctctgactgctggagctcactgaggtaccgctcagcctgcttggttgcatcctccgcatggcgagtcagctctgagatctgaaggtcagcatgcttacgctcggcctcacatgtgtcaaagtgattctggatctccttaagtcgatccaacatctgcagttgctgtttttccccattctccagttcacgtgttaaattctacgaataaagcatgcaaaacatcaggaacaaatccttgtcaaaattggatgtgtagcatatcatcaaacaagaatctctaatgtcactgaagtggaaatcatctgtattaaaattcattagcaatc

SEQ ID NO: 2114 - DNA, 312 bp, Homo sapiens
  misc_feature 2, 6, 10, 12, 18, 23, 28, 29, 31, 76, 91, 93, 95, 115, 138,201, 219, 236, 245, 265, 273, 281, 297: n = A,T,C or G
antganattnangggggnaaaantttgnntnagggcttaagtgacaatgaccctaatatttctgagtactatccanggggattcacacagngngnagcttcaccttcctttcacngtgacagccttcaaaattgtctnctttcccaaattcctacaagcaacacccacaactcccgtggcatgaaaaaaaatgggagcagnggtgcacatctgtaagtnccagcctactcacgaanttgaggccnggaggatttctggtgcccanaagttcanttgaaggnctgcctgccaatatangaagactctatcctc

SEQ ID NO: 2115 - DNA, 405 bp, Homo sapiens
atggagacggtgtctcccgtcagggcaaagacttggtgcttttggttgcatataccttataaaagatttgggtttccaaagatcagaattctttgactgtgaaacaaactcactgtgtgtccagcatccacctgagttttctctgcaccactccaatgtgactgaggagtcaaaggaaactggtgtgaacatgaagctcatgctacctgctgtgccatgagtagcaaagttctttgtgtctgatcctggagtcctgtgtcttctgcagaatctgtgaaattgtagccagctaacctgttagcttgtaagatgataaaatctcagatccttcacaattctctatgatatggtgatttacttcttgactacagagatgaaaaatataagaaattgtgactaacactg

SEQ ID NO: 2116 - DNA, 324 bp, Homo sapiens
atggagtctcgctctgtccccaggctggagtgcagtggcccgatctcggctcacagcaacctctgcctcccgggttcaagagacgctcctgcctgtgccttctgagtagctggaattacagcttgttgcagttcttacaacttattattgagcccttaagtctatcttgtctggacatgtagcagaaaacaactttacgacttactaaagtatgaggaagacggcgtctcactttgtggcccaggctggagtattatgtatataataatattatacattattccactttgaccttagtcaatgaagagcgagattaggagtgtc

SEQ ID NO: 2117 - DNA, 312 bp, Homo sapiens
gaacaagctggcaccacctcagaaacacacaggaagacagcgggggcctatctgccacgtagcaggagcctgcagagaaagaaattgacgggaggagcaggcggcctcccatccggcctggctgactcattatttgcttttctgatttcacatctattcatggtgggaaatggagaaaaacgattacactccaaagaggaaaatgaagcccccggagtcctcctgagatagccactgaaaacatcttggctcactcccttgcacctcctatgcatacatgttttctttttcagaaattaaagaatcatattg

SEQ ID NO: 2118 - DNA, 543 bp, Homo sapiens
  misc_feature 467: n = A,T,C or G
gacctgtgaatatgttatcttacatggccaaaacgacgttgcaggtgtgctgaaagtcacaagtcttgagatgggaaaattgtcctgcatcatcctgatggattacatctaatcccatcggtccttaaaagagaagaatctttcccagggagaaagatataatatgagaaggacttgaccctgtgtgtctggcttcgaaggtggagaaatgtagtcataagccaatcaacgcagctgtctctagaagcggaaactaccttcagtacagaaccagcaggaaaacagaaaccttggtcctatagctgcaaagaacagagctctactaaccacagcagagagcaaagaacaattgccttagagcttccagaaacaatgcagcagatcaccaatttccttttagtctggccagttgtgtataaaccttctgacctatagtatagacctgtgagataataaatatgtgctgntttataccactaaaaaaaaaaggccagccgaggccaattcagcttggacttaaccaggctgaacttgctcaaaagg

SEQ ID NO: 2119 - DNA, 690 bp, Homo sapiens
  misc_feature 22, 26, 30, 48, 52, 61, 68, 72, 80, 98, 105, 108, 128, 144,180, 206, 218, 221, 233, 238, 268, 276, 278, 281, 292, 296,315, 316, 319, 336, 347, 359, 361, 364, 381, 458, 469, 484,491, 499, 512, 527, 538, 551, 563, 566, 569, 574, 575: n = A,T,C or G
  misc_feature 598, 613, 633, 648: n = A,T,C or G
tttgggacccattttcccccanaggngggncccattgggggggaaacncccngggtccaanttccccnaaangggccgangggaaaatccaacccctncggtttnttnccccaaaaaggggacctttnaaagggggccccccanaaaacttggggggaaaatggggggggggaaaaaaantaaacggtttttttgaaaaccaaatngggaaggagggnganccaatttttatnttttnttgaaaaatggggaaggcccttcttaaacngggctttnanttnggggaacaacngggngggggatcaatggcctggnnaanccccggggattggttcnggattcccttnaaccaagagaancntgnccttttttgaacaagcnccgttggcacctttgcccttacagtaaaacctcccccaagtggtgccccttcccaagaatcattaaaatggggaagncctgaaggaanccaaaaacccaaggnaatggcncttggggnaaactcccctggnggaggggggatcttnttggacccctnggaatcaactttnttttttaaaaanggnccnggccnnaaagggggggtttgcacaaaaangcccttgaaaaaagnggtcccaaaatcaacctggntttaaaaaatttcanaaaaaattaccatcttggcattttttgaactttttttgaaaa

SEQ ID NO: 2120 - DNA, 404 bp, Homo sapiens
gtctctctagcagtctgacaccttcaataagagacagtcacatctattctttctgaagacaactacctggaggattcatctacgtgacaagaaccttggcttccacaacaacccccttaccttatctcaagctgatttcaactcttcaggcagagcttaaccctttcaaccaattgccaatcaggaaatctttgaatccacccatgacttgtaagttcccccacttgcagttgcccaacctttctgcactgaaccaatgcatatctcacatattgatatgtcttatgtctccctaaaacacataaaaccaagctgtaacccaactaccttgggcatgtgtgctcaaggctgtggtcatggatcatgatccttaatctttgcaaaataaacttttaaattcattg

SEQ ID NO: 2121 - DNA, 369 bp, Homo sapiens
gctaattcctcaaaacactactttcacctcattgctcctttgctcaaaagcctacttggtgcatagcacagcatccaacacagagaaggaacacagctggactctatttcctagccttcctttgcaggaggatgtggccagtgaaatgtgggcagaaagtatgtgcaccacttccaggtatggttgacagaaacctgctgccttacataatcattcgtcttctttcctcttctgctgtgactttagaagtggtgaagatggcacagccacaagatggaaaaagacaaaactgcttgagagattcacccactaggaacacctattttgaacttgacataatcaaaaaataacttcagttggttttaaggc

SEQ ID NO: 2122 - DNA, 371 bp, Homo sapiens
gacctccgctgacctgagcacttcctgcatgaaaggggctcaataccaaggaagaaaacagatacatgcaccctttctaagcagcaaaactgggttcaaatcctcggctacatcacttatgtgagatgaagtcccactatattgccaaggctggacttgaatccctaagctcaagtagtgttcccacctcaccctcccaagtaactgagactacaggtgcacaccactgtaccagcataattgcatatcttatcaatcaatccacagccactaaatacctactgaggtatctgtgtcccctgggctttttccaagagctttcaatatggttagatttgtttattaaatttgcataaatatgtgatatgagt

SEQ ID NO: 2123 - DNA, 561 bp, Homo sapiens
  misc_feature 486, 526: n = A,T,C or G
ttctaaacctacagtgatatggaagagtaatctgccaatagtacagaaacaaatgagaagtgttccgtcctgaagtcaaaaagttcagggagcttcagccctggtgggtgaagggagagatttggagacttctttcctatgtgatgtcctctccgtggattggtttgtgaagctgacggccatgaccccagaggggaagctgttagagaaacgctgtcgcccatttgttaaccagacacgtccactccagtgttctccacagctactccatgaggcggacagcagcagccccactttgctgacgggaaacctgccacacggtccccagcagggaaggggctgggctgggactcagacccagagagcgactgtctggtggatccaaagtcaggagttgctcgtctaccttgagtccaaaaaggtcgagacaagcagtcccagaagtggcaagagaaagtttgggaaggcagaaaaaacactcctgangtgactggtcacctgctcactccaaaaatgttacctttanggttaagcttttaataaaccaagctaataaaatct

SEQ ID NO: 2124 - DNA, 389 bp, Homo sapiens
  misc_feature 42: n = A,T,C or G
gctggagtgcagtggtgcgatcgcagctcactgcagccttgncctcctggactcaagtgatcctcccacctcagcctcccaagtagctgagacaacagatgtgtgctatgaagaccagctaatttttcttttcattttttgtagagatgggggtctccttatgttgcccaggctggtctcaaactcctggcctcaagcaatcctcccatctctgcctcccaaagtgctgggattacaggcatgagccaccatgcccagcagagggaaatttatttagagagaaaagaggacattcacttggtgttcttcaacagctaacccagatgaccaaaaccctctttcagaagcccttaacatatcctgcaacagcaaaaaaaaggtgtttatac

SEQ ID NO: 2125 - DNA, 204 bp, Homo sapiens
attttgagcttcttgcaagcagaaaaaatatcagaatcatctgcctcacaagtgtctggcacagtgcttgtcacataaagatggcccacaaaacttcaatgacagaagagggaaaggaaagaagtctgacagatatctaactatatccaagaaagacatgaaaattcattgatttataaatttgcatataaaatgtaaagaaag

SEQ ID NO: 2126 - DNA, 173 bp, Homo sapiens
gtgcaaggagccgcacatccgcacaagtgctgagaccctgcccaggacaagcttggccgcagtattccctttggcacccccacccacctggaacaaagcctgatgtaaagtctgggtgcgactcagaccggcctgggaaagaatttatttaataaatggtggaaagtggcttc

SEQ ID NO: 2127 - DNA, 359 bp, Homo sapiens
caacaacagggtgcctggcacaaggagatactcagtaaaactctcatctgctgtgtcattaaggggaacacttaatggctcacgcctgtaatcccagcactttgggaggccgaggcggaaggatcacctgagcccaggagttggagaccagcctgggcaacagattgagaccctgtctcaacaaagaagaagaagaagaaaaaggccaggcgccgtggctaatgtctgtaatcccagcactttgggaggccaagaagggagaactgcttgaggccaggagttcgagaccagcctggtcaacatagcgagacaccccccccatctcaaaaataaataaatcaaaataaaaaataaagagg

SEQ ID NO: 2128 - DNA, 312 bp, Homo sapiens
atggtgcaactgacctgcagagaagctaattaacttgcccaaagttatggagctaaggaatggctttagaaagcaaaagaaaaattttttattaagaaatgaaaagaaaaaagacgcagtatggactcagactgataaaccatttgcatgagagaactatcaccatttgaaaaagagcttttttgcaaggtgtggtggctaactcctgtaaccctggcaactcgaaaggctgaggcaggaggatcacttggggccaggaggtggagaccagctggcaatcagcaagatcctgtctctaaataaagaaccaat

SEQ ID NO: 2129 - DNA, 378 bp, Homo sapiens
tcctctagttccaccaaagatgaaatcacaagcagggaccaacctacctgcaaaataagcttcagtcccactatacttgaccggattacccacacaaagtgcagcaagaatcactgtcaatataagatctcctaaagtggctttgctggaacctctcacaaagaatctcagacttaacctccaatagcctcttgagccaagccaaagatgcatctgcacttgcagatacctacatggatttggaaaatccctctcttcatgaggcctcagaacaacttgaagttcatgggcctgtcagaaagtggcactctaggccagcgcagtggctcacacctgaaatcccagcactttgggagactgaggcgggcggatcacctg

SEQ ID NO: 2130 - DNA, 379 bp, Homo sapiens
gtcaccagtttcaaagatttgtacatcctggtgtcacgggtgaaaagcctattggtgggcaagcacataaggcacgtgggatggccaggggcctccagcacaggaaggccccgagtgaaagcctagcagagttaagcgactgtacgacatgctgaaagggatcagtgatttctcctgcagccagttccaacctgctgaaaggaacactgagaaaatatatggactcagtaaacctgagctgcctccaatggcctcactcactccaaccctcaactttgcaatgctggaatgctgagattatcgtccacaaggagcagaagctttcatagaggaacccatcgacgtggctcctgccaaagtcctcaacagggcttcgaaa

SEQ ID NO: 2131 - DNA, 376 bp, Homo sapiens
ggaggatgctgtgacccctcaatggatatgctaatcatcacatcagaagcacaactagcttcaaatggaaaccagattgcacttggtcactgacgaagcaggagattaaacaagctacactgtgtctctgggagaacaaaaagccaaaaggcacatttatcacctctgaatcacaatggagtctcactctgtcacccaggctgcagtgcagtggtgccatctgggctcactgcaacctccgcctcccgggttcaagcgattctcccacctcaacctccccagtagctgggattacaggcgtgcgccaccacgcccggctaatttttgtattttagtagagacggggtttcaccatgttggccaggatggtttctaa

SEQ ID NO: 2132 - DNA, 193 bp, Homo sapiens
  misc_feature 3, 4, 7, 8, 13, 16, 18, 34, 56, 76: n = A,T,C or G
ggnngcnngtccnaancnaaaatagtgaggaaangttggctccttctagaggctgngaggaaaggatctgttccanacctctctcctttactttgtggatggccgccttgcccctgtgtcctcacctaatcttccctctgtacgtgtgtccaaatttcctctttttataaagatgccactcatattagatttg

SEQ ID NO: 2133 - DNA, 471 bp, Homo sapiens
  misc_feature 8, 9, 11, 20, 47, 48, 51, 54, 58, 60, 73, 74, 82, 88, 93,96, 97, 103, 107, 108: n = A,T,C or G
gaggaagnngnagaccactnacagtggggaggaatccatcttccatnntgngangatncnatagcctgccatnngcaacatncatggntgganctnnaagacnttannctgagtgaaacaagccagacacagaagcacaaatattgcatgatcccacttttataaggaatctgaaatattcaaagtggtagaaccaaagagtggaaaggtggtttccagaatagttgctggagaagggagaaatggggaggagtgattcaaaaggtacaaagtgtttatatgcaagatgaataaattctggacaaaagagggcctctagttaacaataatgttttattatacctaacattttgctaagaaaatagaacttacgttaaatgttcttaccacaaaagtaaaaaaaattttagaaatttaaaaataattgtagtgagccaagatcgtgccattgccttcaacctgggtgacata

SEQ ID NO: 2134 - DNA, 326 bp, Homo sapiens
  misc_feature 2, 5, 8, 9, 13, 33, 39, 41, 47: n = A,T,C or G
anggnagnnaggntggaaacaactgtgactatnctaccntngctganacccgtggaggatggatgaacatctcttggatggatgggactgaaactgaaccttgaaagataatgctgagcctggataagtgccccaccgtccctctgcccaaattcaaatccttcatggcccagtgcaaacaacttctcaaaagccccaaacatctttgtctaacaggaagcttttagcttttttactgttttgacattcatttcccacttagtattatgcttacttgtgtattaaccttgtcacccctactagactataaaattcttaaaaacagg

SEQ ID NO: 2135 - DNA, 289 bp, Homo sapiens
agacgaggtcttgccacattgctcaggctggtcttgaactcctggactcaagcaattcttccactgtagcctcctgaggtggcaggattacagcataagccaccatgcctggcctcagtcacactttggaaaagaagactatggatctacatgttcattttgtggtcgaattataaccaacacgccactctatctgcctccactctgctttttccatgcctgtacttaaatgcttctcagaatttttaatgtacctccctgccttttgccatagattttatactcactg

SEQ ID NO: 2136 - DNA, 254 bp, Homo sapiens
tctgataggtggaagaagacaactctcagataagacttaagactttggacttgacactggaatgagttcacagagtgagagctggtggtttaagaaagcctggcatctcccttgatccctttctcttcatgtgatatgccctgttgccttctgccatgactggaagcttccagtggcctcgccaagaacagatgccagaactatgcttcctgtacagcctgtagaaccatgccaaataaacctcttcataaatg

SEQ ID NO: 2137 - DNA, 285 bp, Homo sapiens
  misc_feature 4, 7, 32, 115, 173, 174, 191, 193, 202, 207: n = A,T,C or G
ggancgnaggatgcgtgatcacagctcactgnagcttcaatccccggctccagtgattctcccacctcagcccccgagtagccttttgagcaggttcagtctggttaagtccaanctgaattgggccaattgttttgatttttaccctggatgaaatactcatatccatcatnntttattaaccccccatntnttacacatntggcngcaagtactgggattcaggcaagagccaccgcgtctagccaattatacaatttttaaaataaattgaaatggtcgttg

SEQ ID NO: 2138 - DNA, 290 bp, Homo sapiens
aggattggcaacgtaattcacaaggcccagtggaaaatgaaaatgcaggactccttgctaaaaataattatgaagaatttcaagatagcagagcattaaatcactcacatagctccattgcgtgaggggctctgtgcaactgtatgggtcacatgcccatgaaatggccctgctgctacaagagacaagaaagatcacctctcctgtatcagttcccatattaatcaccccattttgaccattctacaaatgttaactgttatgcttgttattaaaaattcatcaagtgc

SEQ ID NO: 2139 - DNA, 331 bp, Homo sapiens
ttactatgagaggtgtgttaaaatctctctctgaaagaaagaaagaaagaagaaaagaaagaaaagaaaaggaaagaaaagaagaagaaagaaagaagacaacccgtgaagcttgctgcatcagtggactcttcctttcacaaaacatttttctgtagtatgctatgctgtttgacagcattttactcacagtagaactgctttcaaaattggagtcagtcctctcaggccttgccaatactttctcaactaagtttatgtagtattgtaattcctttgttgtcatttaaacaatgttcatagcatcttcgccaggaatagattccatctc

SEQ ID NO: 2140 - DNA, 401 bp, Homo sapiens
gtaagcgatgccagggcaggctcaggcattctagaagagaggaagaaaagaaggcaacaggaactaggagagagaaggacgtggacaggaggaggtgtttgactagaagtgcgtccaaccaggccgggcacagtggcttacgcctgtaatcccagcactttgagaggccgaggcgggaggatcacctgaggtcaggagttcgggaccagcctggccaacatggtgaaaccccgtctactaaaaatacaaaaattagctgggcgtggtggtgcacgcctgtagtcccagctactcgggaggctgaagcacgagaatcgcttgaacctgggaggcgcaggttgcagtgagcgaagatcgcgccattgcattgcagcctgggtgacagagcgagactctgtctc

SEQ ID NO: 2141 - DNA, 132 bp, Homo sapiens
gtaaagatcaaccatcaagatcaaagatccccagaatggcaaatacatacgtgtatgggctcaaagttggaagacattcctctaccatctacttattctggttatacattaaagcataggagggcatagctg

SEQ ID NO: 2142 - DNA, 125 bp, Homo sapiens
atcaccatctttgacaagctatacctactaaaagatgtgaagcagacacctacattccatgactcaactgtaaagagaacacaaagctccagtcataggagaaagaataaaataaaactgctatt

SEQ ID NO: 2143 - DNA, 290 bp, Homo sapiens
  misc_feature 250, 263, 267, 272: n = A,T,C or G
gggcattcagataagccatcatatcccctgtggacctggcacgtacacatccagatggccggttcctgccttaactgatgacatttcaccacaaaagaaagtgaaaatggcctgttcctgccttaactgatgacatggtcttgtgaaattccttctcctggctcatcctggctcaaaagctcccctactgagcaccctgtgacccccactctgcccgccagagaacaacccccctttgactggaattttnctttacctacccnaatnctatnaaacgggcccacccctat

SEQ ID NO: 2144 - DNA, 166 bp, Homo sapiens
  misc_feature 92: n = A,T,C or G
gggtcttgccaagttgcccaagctgggcttgaacttcctggacttcaagtggatccacccacctcagcctcccaaagtgctggggattatanggtgtgagctgctccgcccagcccagaagcaaaccttatattcagtctcattggattaaattctatccctccgc

SEQ ID NO: 2145 - DNA, 616 bp, Homo sapiens
  misc_feature 39, 43, 51, 425, 457, 523, 528, 550, 557: n = A,T,C or G
aacatcaaatagcaaatgaatagcatcataagaaagtcnaganaaagaccntgggagaaagaaaaaacttttaccacgcttttttcatgatctttgaacaaggagctctaaattatcattttgcactggctctgtcccagctcatgtttgttgagtgaataaataaataaataaatgcatacatacatatttattagtacatggaacacactgattatcttccatttcctaacaacactgtatgtaatcaggattgcaggcatgttatgaaatactagaatagctgaatattaaaattattctggaatcatgtatgcttattgttggggttatttgtgacgtctccaaagtcatcacagttttctcagcatcaatgtcctcatctcaccccagtcctagttctagtcttaagtggaatagattgnatcagactaatcctctgacagacaacaacggncaactgtggatgaaattttaaaacaactatttaaaaatgccagagagcaaacaaaagcagacaagntaganggcttcaactcacgaaatccantaacgtnctgactggagactcatgccccccccccctgacagaagggacagaagctctattgaaaag

SEQ ID NO: 2146 - DNA, 101 bp, Homo sapiens
  misc_feature 2, 39: n = A,T,C or G
angcagtgtgtggattacactatcactggaaaaatacgnattgagatagataggaaaacgctaaactggcagattagatttttaaataaagattggattat

SEQ ID NO: 2147 - DNA, 154 bp, Homo sapiens
gtgaggacacagcaatcctcccagaggatgcagcaacaagaacaccatcttggaagcagagcagccctcaccagacaccaaatcggccagcccattgatcttagacttcccagcctccagaactatgaaaaataaatttcttttgtttataaag

SEQ ID NO: 2148 - DNA, 241 bp, Homo sapiens
gagcagcttgccaatttctggaagaaagaaggaggagggagggaagaaggaagacgaaagaataagaggaagaaggaggaggaggagaagaaagaagaagaaaaaaccccactgggattctgacagggattgcattgaatctatagatcagtttggggagtgctgccatcttaacaatattaagtcttccaatgcatgaaccgtataaagtaaaaggcaatgtgagccactctttactaat

SEQ ID NO: 2149 - DNA, 353 bp, Homo sapiens
  misc_feature 7, 10, 14, 25, 57, 85, 89, 95, 97, 99, 132: n = A,T,C or G
gggcatnctnatanaccatgatatnccctgtgacctgcgcgtacacatccagatggncggctcctgccttaactgatgacatttnaccncaaaanangngaaaatggcctgttcctgccttaactgatggcntggtcttgtgaaattccttctcctggctcatcctggctcaaaagctcccctactgagcaccctgtgaccccactctgcccgccagagaacaacccccctttgactgtaattttcctttacctacccgaatcctataaaacggccccacccctatctccctttgctgactctcttttcggactcaacccacctgcatccaggtgaaataaacagctttattg

SEQ ID NO: 2150 - DNA, 609 bp, Homo sapiens
  misc_feature 3, 5, 11, 12, 15, 23, 489, 517, 533, 541, 563, 588: n = A,T,C or G
tgnanctgaanngcngtgctagnatctgcttatcttcctgggaggcctcatgaaacttacagtcctggtggaaggcaaagtgggagccggccagtcacatggccagagcaggagcaagagagcgagggtcaccacctccctcagacgtttctgggacagatccaagccagcagagcagctgctcgctccagagccgtggtgtcttcctggtgcatcagcgccaccgcgtggcaaaacagggcaactgtaggaatcgactttccatctatttggagctcatcagtgcttttcttttaggtgacaacagagttgtccggcaggtttttcctttcttttcttcaagtagggtaacattagttcacatctgctcaaaataatttatgttcgtattctaacagactcatatggcaggaacaagaagtgcacatgccaaaagaaggcagaggactgcaggagcaagacgggttgcaaaggggccgtcatgactancacaatcctggcccctcttctttcagcnttataaagaccagtanaataatantgcatgagttattgtgcagtancacttttcaaaaatatatacattgnggaaacagacccctccaaaat

SEQ ID NO: 2151 - DNA, 411 bp, Homo sapiens
  misc_feature 246, 317, 326, 327, 328, 329, 330, 331, 332, 333, 334, 335,336, 337, 338, 339, 340, 341, 342, 343, 344, 345, 350, 353,368, 383, 388, 390: n = A,T,C or G
gtggggtctttcaagatgaagaatcaagaaaatgtttgctgcagccataaaaaggaatgagatcatgtcctcggcagggacatggatgaaggtggaagccatcatcctcagcaaactaccacaggaacagaacaccaaacaccacatgttctcactcataagtcggagtggaacactgagaacatatggacacagagaggggaacaacacacaccaggcctgttgcggggtgggggctgagagganggaacgtacaggatggtcagtaggtgcagcaaaccaccatgacacacatatacctatgtaataaacctgcncgtcttccnnnnnnnnnnnnnnnnnnnnaaaanggnggggggggccttttngtttgggttttaacnggggntntttttttaaaagggggggggg

SEQ ID NO: 2152 - DNA, 296 bp, Homo sapiens
cggccctgttgagcagcaagggctccacccagcaccagacacatggctgcagaccacagggtttggaactccacagacacagaggcagcagcagcttttggaatgtttcatccgttccctgctatggtccctcatcagcatcctgcagttctgacctgcccaaccctacgcaagaacttctggtgaaactttctctaatcctctcactttccttcaagacctttacttccgccagctcctctactatttgaggaaggaccaatttctataataaatcccttaatcccataataccc

SEQ ID NO: 2153 - DNA, 523 bp, Homo sapiens
  misc_feature 471, 500: n = A,T,C or G
ggactgtgctaggaaccgggaatcctgtcatgaacaaacacactccaaactggaggggaaatctgaaaccatctagtcctttgcactccatttaaggatgaagaaagtaaggccgagagggggaagcagagtgacctgctcaaggtcacagagaaggtgacgtggtgtacaacgaccttgacggcatgctgaccgtgaagacaaactgcagagattgatgtggtatatttagctgaattttgtgactgagggctgttaaagaacgagaagagaggagagaaagccttatttggaggcctagaagtcacagactgagacgtcaatgccaaatctttcatttcccactgtggctttttgttctctctctaggaatagcaagaattttgtacatagctgggaatgaaagcgaagaaaatgggcccgggataaaggttgagaaaactattttcttttgaaagggcgggcttccanccttggccggggggccaaaaaaaaaaggnccctggatgctttttttgacccg

SEQ ID NO: 2154 - DNA, 471 bp, Homo sapiens
  misc_feature 406, 418, 437, 447, 453: n = A,T,C or G
ccttggtgaggtaagaagagcagctgtgagaattaacaagaccagagttctgtgcctggatccgttcttcatctatgggtgacctcacaagtcctctgcctcaattctgtcaccgaaagaatgaccattttacctggtcaggccctggcatcgggtaagcctcggatcaaatctcatctccatcacttgtcagggaaaatccttaaccaaggagcaaggcatctgtctttaccaaggtcagccaacccactggcaccaagacatcctttccaccacccccgacttgctgcagggctcagatttcatcaagtcctctttatcaagttcctattacaaggcaggcatagttatgcagaagaagaaccagacaaggctggaggcaagacatgtatgtgaggtgtgtggnctcaaaagtcangaggctacatctcccttcnaatatatttncctttnaatggattttctatgaac

SEQ ID NO: 2155 - DNA, 303 bp, Homo sapiens
  misc_feature 165, 168, 177, 180, 187, 188, 189, 193, 206, 207, 216, 233,236, 237, 244, 245, 249, 258, 259, 264, 266, 278, 279, 280,282: n = A,T,C or G
tcccatccgaagcacgtgaacatctacggaaccttccctgcagttaccggtcgccgctcacctgctggggcgcgaggtgcagagactgtaccgaccgaggacccagaggctgtcaccacggaggggaagtcctcagctgcacaggttgggggggggggggggggnccnacccatctnttnaggtttnnnttcngccttgttttttnnttccaaaanttttatttttggggggnctnnatttttnncagnacccttcgnnttttnanttttttgggttnnnantaaataccctgaattttaccc

SEQ ID NO: 2156 - DNA, 526 bp, Homo sapiens
  misc_feature 459, 462, 468, 471, 475, 478, 483, 488, 492, 503: n = A,T,C or G
agcccagtgcagctgaaatcctagaagacctcacaactgtgttaaattttcacagctgaccacttaaaggcagttctcttcaaataagagagtctcactctctcacccaggctggagtgcggtggcacgatctcagctcactgcaacatctgcctcccaggttcaagagattctcctgcctcacttacatagatgagtttgataacagtcaagctgaaactaaaaaggccatgatgagataaaagatcaactaaggaacaagcgtgaaaggcagctttcactgaagtcctgaacctatgactgatcttaccaggcatgccaggagaatacgctgccaggttccctcacctctaccctccaactacagattgaaaagtctgctttgcctcttctaaaccattgcgtcttgaacttaaatgtgctgataaactaccagagaatcttgttggaaatacaaanttntattcnccncggnttnggaanggggnaccnagaaatttttntttttccaacaagcttttaaggg

SEQ ID NO: 2157 - DNA, 499 bp, Homo sapiens
  misc_feature 12, 324, 329, 331, 334, 341, 344, 345, 347, 363, 364, 374,378, 379, 380, 381, 384, 386, 389, 396, 397, 402, 405, 408,416, 422, 430, 447, 451, 452: n = A,T,C or G
caatgatcacangcatcttcaccaagaggagcttccatctcaagaaagcactctctctttgctcatccgtaagaagaaactccccatctattcaagttggatcatgagattacagcagttcagtcacatattcaggcttcacttccaattctagttctcttgctgtttccaccaaatctgcagttacttccacgagtgaagtcttgaacccctcaaagtcatccatgagggttggaattaatttcttcccaactcctgttaatgttgatatggtgacctcttcccattaatcataaatgttcttttttttttttgggaaagggngtttnanttngcccccnggnngnagggcagggggggggnntgggttaatngaannnnccncntcnggggttnncccanttntcntgcctaancctccnggggaggngggaaaaagggggcccncccnnggcccgggtattttttttgtttttttaaaaaaaaaggggggttcccc

SEQ ID NO: 2158 - DNA, 497 bp, Homo sapiens
  misc_feature 445, 447: n = A,T,C or G
tcaacccctacaggccctgggactcctctccgtccactggaaaggcaactccccacggatggaatccgctcttctccccagctctgctgagcacctcatcagacattttaagcagctgtgtcacatgacttccagtacagggagccccacaccaggcttccatgccagctggttactcccaggcctccttgactggtactaatgcaccatgaccctcgcaagtgcccatgccaggagaccatgaactttacctcgatggacagccttccttcctatgctccagctattctttttgagggagattaccgaatataataagcacatgatatgtacatatgcatatatacaccgtttgtgcatgtgtatgtatagagacacatatgtcactaaaataactgctcacagatatttaatttcaaactttcatttcccctttaccaccttntnggcccaatcttccccaacaaaagccgagggggattaaaccgggtttggtt

SEQ ID NO: 2159 - DNA, 580 bp, Homo sapiens
  misc_feature 3, 11, 18, 19, 25, 26, 28, 36, 42, 44, 46, 63, 73, 74, 82,103, 125, 334, 403, 405, 510, 521, 526, 553, 560: n = A,T,C or G
gtntgcatcgncagcttnnatatcnncnatgtcggnggcctngngnaacttacaatcatggtnggaaggggannaggaagcncggcaccttttttacaaggcngcaggaaggagaagtgctaagngaagcaggaagagccatttataaaaccatcaagatctcgtgagaactcacacactatcacaaagaacaggcatggggaaaccacccccatgactccattacttcccaccattcccttccaggacatgtggggggattattgggggattaccaattcaaaggatgaagattttgaagttgggggaccaaccatatcactatttgtgaagnatgcttttattattgggcaaatataagttatttgcataaaagttcattaaagtatcttgctcttttttngnaacaagggacaaattgggaagccccttggattattattaccaaaaggctttttgactgggaaataattatatctttccaatatgaagtaagacagccttttgaanggaaactgggngggtnggaatttttttaaaggctttttaaaanccccctngggaaaaccctgggccctta

SEQ ID NO: 2160 - DNA, 367 bp, Homo sapiens
ctatatcatcatggtatttattaagccactggagaggccagaattatatcagagatacaaccagcctgccactcattggcctttaccctctgtgatgttcctgacactgccagcaaaacctctctatcacagacttacagcttcctccagctgcaagaaaccctggtcttgttcttatctactaagcaaatgaatattataatcgacaaataaatgagcttgattgggtcctcatccacttattcactcatgtcacaaaaattaagtgaattacaaatatggaccaagcactgaattcatttttaaaaatttaatgaataaataaaatgatatgagtagatgcataaatgaacaaatgactaaaact

SEQ ID NO: 2161 - DNA, 461 bp, Homo sapiens
  misc_feature 414: n = A,T,C or G
aactactatgcaaagaggtcctgctacccgtgctggagagacctcatgtagagactgcagccacatggagatgagcttgaagccatccaggacatttcagccacagatgagctccagctgaatgcaggcacaggtgtaaccccagccaacaccacatggggggcagaagaaccatacagctgagcccagccaacccacaggctttccagaaacaagccaggagtgaggtgggactcttctacattcagtgactcaatttggtcagaactaaggacaatgaggaactggccttgggtgcaaaatttaagggagtgcgaaaaattgagtcattgagataaattatattttaatgcaatttttaatgcaatattttaactaataaaaattaatgcccaaaaaaaaaaaggccagcgnggccaattcagttttggacttaacccaggctgaacttgcttaaaagg

SEQ ID NO: 2162 - DNA, 530 bp, Homo sapiens
  misc_feature 474, 483, 492, 499, 516: n = A,T,C or G
atgcagtcttgctccatcacccaggctgaagtgcagtggcaagatcttggctcactgaaaccgccatctcccaggttcaagcaattcttctgcctcagcctcccgagtagctgggattacagatagtaggactgaacttctgagaggttaagcgacatggcacagattacacagaagagaaagattttgaagatcagatgaagtagttaccttggaatactgcagaagaagggtctggctctgttgcccaggctggagtgcagtggcatgatctcaggtcacagcaacctctacctcctgggctcaagtcctcccacctcaggctcctgagtagctgggactacgggcatgtgccatcacactcagctaaagttttgtgttttttgtagagatggagttttgccatgttgcccaggcttgggctcaaactcctgggatcaagtggatctggctggttcacccttccaaagggtnggaataccngtggggagnactttgnccggcccaatggatttntttttttgggctga

SEQ ID NO: 2163 - DNA, 136 bp, Homo sapiens
atgaggacactgaggtgcaagacgtttgaggttatccaagttatccagggtcacacaactgatgaggaaaccgagcctcagagaagtaaagtgaaacacccaagttgatagtgtcaacaaattaaaagtccaagcc

SEQ ID NO: 2164 - DNA, 518 bp, Homo sapiens
  misc_feature 35, 51, 53, 58, 71, 79, 105, 129, 148, 158, 205, 211, 217,235, 240, 284, 317, 323, 341, 355, 372, 374, 377, 403, 404,405, 422, 425, 426, 455, 462, 467, 471, 493, 495, 503, 504: n = A,T,C or G
gcccacattgccgtgcggttgggccaagtaactcnttgacccgaggaacgngntgtgngacattgcatttnggatggcnattgaaggggatgtgctattgcccanaatattccaaaccctgggacccgncttagaggggcatggctgncttcagggangaagccggactcccaaaattgttggcaaaatgacccccattttaacncttcangcatgnggagaatgcatgccctgnagagnagggatccatgaatggaagatcttgtggccaagattggcctttnatcatttcacctctccaaacttccatttcttcncaaggnatgaatgatgggaaatanaaattgacctggcngtgaatgccctggaaancnacngtgctgaatccttaaccaccttactnnntaccttttccttaagcnttnncccctgggcttagaaaattaattcaccgnagggggnttggngttntggctttggaaaaaaagccctngncttctttnncctggaatgggaat

SEQ ID NO: 2165 - DNA, 296 bp, Homo sapiens
aatctcccttgttgtggatttcagaccttgagtgtacagctccccatctggactctcgtgaaggtcgtggtaaacaacacacagagcatctctttgtcacgggctcagctgacacgtctccctccctcaccactgccccgccagcctccagcagcacatctgcggtggacaatgagtctcatttcacattttggctctgcggtaggcatcatcatggggacagaatacacaccacaagataataaacaagggactgttcaagaacaaatatcaaaataaagacaaaaggaaagagg

SEQ ID NO: 2166 - DNA, 338 bp, Homo sapiens
ggacacttgcccttggaaccttgtcttaaggaaacccagatcgaatgcacagactacattggttgttgtggttgacagttgcagctaagattcaagcctacagccagtatctagaccagatatatgaatgaatgagcctttcttgcctccagccttggtctgttctaccggatactgaagtgggagaaataagttgtccccactaaggactgctcaagttacagatttatgagcaaagtaaatgttgtcatggatttcagtcactaaattttgggtggttcattatgcagcaataggtaacacaaactattaaagtctttattagtataacaagcccc

SEQ ID NO: 2167 - DNA, 452 bp, Homo sapiens
  misc_feature 349, 378: n = A,T,C or G
ctggcgtgtccgaatgggctgagctaccggattaagagggacaccccaaagcccccattgctgggttattgctccagagccaatgttcttggggaaaggaagatatgccctttgtcaacattgccactgctggtctgtaaactcctagacggccagctggtggttcacaaaccaggactccttgctctggccctacccctacctaccagaatgaccgtgaacccttccccactcactcctacaaccaggtttccatctcctctctcagcttaggtttccctaactgtaaaataaaagggttggactaggttaaggacttcctgctatttctctctcccacactctaagnttccttaggaatgcttcagaaaacagcangggttggggcaaggatgccacttgagtcccagagcaacttcaatttcatagggcacataaatttatgtgaaagt

SEQ ID NO: 2168 - DNA, 513 bp, Homo sapiens
  misc_feature 361, 379, 383, 389, 390, 412, 416, 425, 426, 441, 457, 469,472, 483, 484: n = A,T,C or G
ggagaagaataacatttatttaatggatgctgagcaaaaggtattcacaattcatgcttcagggcttaagcctatccgagatcagaagggaacttttccagtctccaaattgtacaactgggagctataacactcaccgagaagatctgcagcttctctcctgaagccagcgagaccatgagcccaccaggaggaacgaacaactccagacgtgctgccttaagagctgtaacactcacagcgaaggtctgcagcctcactcctgagccagcgagaccacaaacctaccagaaggaagaaactccgaacacatctgaacatcaaaagggacagcctccagacgcgccaccttaagggctgnaacacttcaccccggccngggnaaaagnnggggggggtttttcccccccgncccnggggggggnnttttttttcccaaanttttttcccttttttngggaaaaaaagnttnccccaaggggnnggggggagggggaaaaacccccccccaaa

SEQ ID NO: 2169 - DNA, 150 bp, Homo sapiens
gagaaatacaggtttagatgagacttgttggactcaagttctttcctccacccatggcctctactcggggagctggtcaaatgtggaatttcgaatatcaaatatgtataaaataaatagatgaaagagtacatctcaaaaaaaaaaacc

SEQ ID NO: 2170 - DNA, 423 bp, Homo sapiens
  misc_feature 408: n = A,T,C or G
agttgatgagctggagaatgcgactggcagcacaggcctagggcaccagagggcagactgtacagagacctgtgagaatggtcagaactccatggatcatgatggaatgatcagggacactataatagcgttcattttatgtattaagccagatttgcacaacaattccattgtaatacaaatgtaatctttagaagtaattttaaagcagcaaatgtagaaatgccaaccctcaagtaaaagaaaacaattttcctaagccaaatgtcttttgtgagagatttcaatggtcatttgattttagtttaaagatcatctgaccttatgattcacccgattcttaaatgcacatctcaaatataattggtccttttcccaaatttttttttttggggggggaaaaggggnttttttaaaaaattt

SEQ ID NO: 2171 - DNA, 497 bp, Homo sapiens
  misc_feature 407, 415, 435, 436, 446, 472, 478: n = A,T,C or G
ctgccatgccatgaagacactcaagcagccctatgaaaaggtccacttggggaggaactgagacctcttgccaacaaccatgtgagtaacccgtcttggaagacgatccaccaaccccagtcaaggcttcagatgactgtcactccagccaacatcttgactacgacctcatgagagactctgtgccagaaccacccagctaagctgctcctgaattcctgacccccagaaactgagataataaatgtttattattttgagccacaatatttttgggtaatttgttggaaggcaatagataactaatacaggctctcataatgtcatttatttgggtccagtcagcatgctttaagatctgggaggtttttttttttttttttcccccctttttttttccaattttncccccccnatttttaaaaaaattttccnntttaaaaaancccaaagggcccaaaaaatttttttntttttnaaaagggggggggaaaaaa

SEQ ID NO: 2172 - DNA, 517 bp, Homo sapiens
  misc_feature 390, 402, 414, 427, 431, 457, 483, 487: n = A,T,C or G
atggagtcttgctctgtcacccaggctggagtgcagcggcgtgatctcagctcactgcaacctccgcctcctgggcttaagcaattctgctgcctcaggctcccaagtagttgagattacaggcgtgtatcaccacatccggctaatttttgtatttttagtagagacgaggtttcaccatgttggccaagctggtcttgaactcctgacctcaagtgatctgcccacctcggcctcacaaagtgctaggattataggcatgagccactgcacccgactgtattgtaaagcatattgacaccttcacctaactgtgtttggatcaagtcactctgggagaaagccagtttcaatatcctgaagatacttaagcagtcccttaatttttgngggggaaaaggnaaaaaggaaaantttttttccccgntttngggggggccccaaaaagggggggggnaaaaaaccctttggggaaaaaaaggncccnttttccccttttgggtttttccccaacccc

SEQ ID NO: 2173 - DNA, 407 bp, Homo sapiens
  misc_feature 347, 366, 369, 370, 372, 382, 383, 387, 391, 393: n = A,T,C or G
gcgtatgtggacataaaaacaagcttcatatattgtgtgtcataggggactgccctacctgccaagggtctcactggatctctgtactcatttcctgttgccagctggtggacaatatggtgctaagaactcaagaagttggtcctcacgttgaacctcagaggtcaccaaacctttctggatagctgctagggagtttctggaggtgctcaatagtgacatatgtcaagttgagaagggacagctgatcttccagggtagagatggatccactccccactctcataaagaagatgtgggtttgtttgaccttcactatataggaaaaagcctcacaaattcttcanccccttggatggaggcttnaanncncccctttttnncccnaaancnaaaaacctttttgg

SEQ ID NO: 2174 - DNA, 343 bp, Homo sapiens
ggtcctgtctgggctgtggtcagagggacatgtggctttggaagaacggtcggagagaagcaacattgctggctctgatggaggaagaaagccgaggaatgccgccagcctctacaagctgcagagacaaggaaacagactctcccccacaacctccaaagagaaacgcatgctgccatcaccctaatcatagtctggcctgcagaaccaggagtgaaagataatacatatgtgttgttttaagccaccacgttcgtgaaatttcttaacagcagtagtaggaagctaatatacccgccaagtagagattgattaatttggttaataaacaacaactcctagg

SEQ ID NO: 2175 - DNA, 511 bp, Homo sapiens
  misc_feature 374, 379, 394, 443, 480, 490: n = A,T,C or G
tggcaagaggaaaaacaagcaagtccaactccacaggtttgtaaggagcagccagctttgatttgccctgcacgtcatagctcagaaagttttgctgctcatacaatcctcagcaaagaccatccattcattccgggattcccccagctcatggacacaggtcggtctctaactacagacagccttcttctggaaactctcaccagcctgatttctaaactcccagtccaccttcacattgtttgcctgttttcagtgcctttcctctgcagatctctcagtaggcagccgtaaggagtcagcaaaggctaacacggctgccctcagctggaaacctagtgtagtgcctattacatttctcctgggaaaccccnaaaanccttttttccccccntttttttgggtttgggggaaaagggaaaaaaaaaaaggggggggccccnaaaaatttttttcccaaaaaaaaaaccccctttcccntttaaatttncccttttttttaaaaaagggg

SEQ ID NO: 2176 - DNA, 155 bp, Homo sapiens
aaactttgttccttggaccttctgctccacaggcaagagagagaatttgtccaaatacacgaaatggagctcaagaaaacttcatctgattctcaaagaacacacatctcaactgacatctggccccacacttggtaataaaagtgcattggtgc

SEQ ID NO: 2177 - DNA, 512 bp, Homo sapiens
  misc_feature 397, 420, 432, 471, 483: n = A,T,C or G
agacggggtttcaccatattgcccaggctgttctcaaacttctgggctcaagcaatctgcccaccttggcctcccaaagtgctgggattagagaggctttcctccccctggatgatagttgcaccaccatcaacccagtggctcaagtctgaaaagtcgctcaagtcatctttgaatattttcccagctccctacatccaactcatcagctagtccaatgatttcaaagtctaatcggtatcttaaatctgtccactttgctctgtaatgcactgccaccagcctgatccaaaccaccatcttctctcacctttactacaagagcctcctttctctaatcatgccttaaccccagatcagttcttttcccttttttttttgggggggggaaaaaggngtttccccttttggggaaaaggnttttaaaaaaanatttccccttttttttttttttaaaaaaaatttaaaaanccccaaattttnaaattttaaattttccctttgggggaaaa

SEQ ID NO: 2178 - DNA, 536 bp, Homo sapiens
  misc_feature 394, 412, 430, 434, 435, 452, 460, 473, 503: n = A,T,C or G
actgaggtgcagtggctcacctgtaatcccagtgctttgggaggacaaggcaggaggactgctttagcccaggagttcaagaccagcctgggaaatactgcaaaactccatctctacaaaaataaaaataaaaataaatgagccaggtgcagtggcgcatgcctgcagtcccagctactcagaaggccaaggtttctaataaccataagatcataccattggactgtgtgaaaattttcagaactctaatgaagaaatgaatggcttcatgaaactgccaagcaagatcaagcagatcaagaattaattaccgtgaaactgaactgatgaagatttaaagaaactatttctcttaagctttctagagcttgcagagatctggggtcaggccccnaatttttaaattttaaancccttttttttttttttngggnngggggggaaaaaacccncctggggnaaaaatttttttngggggggaaaaaaccccaaaaaattttttnacccccttttttttttttttttccccctttttg

SEQ ID NO: 2179 - DNA, 372 bp, Homo sapiens
taactgtgctgaactcatcatactgatttctgggactctggagcaacagatatctacaatggagtctcattctgtcgccaggctggagcgcagtggcgcaatctcgactccctagttcaaacgattctcgtgcctcggcctcctgagtacctgggactacaggcatgcaccaccacgcccagctaatttttatatttttagtagatacggggttacattttggccaggatggtctcgatctcctgacctcatgatccgcctgcctcagcctcccaaagtgctgggattataggcatgagccaccgcacctggcctcaaaaagagctcttgaaatattagggctagttagccttttgtcagtattggaatttt

SEQ ID NO: 2180 - DNA, 470 bp, Homo sapiens
  misc_feature 385, 421, 425: n = A,T,C or G
gagtggatccagaatttgtggaatttaaagcttacataatggctttgagatcccatgggctcaagaaacaaatgaaagagaacatctctgcccagccatagaagaaactaccagactctgaagtggaaccacttataccagtgcatctacaccaaaaggtggaatgagagtggctgcttttctggcagcgtggagacgaacattagaaagaagatgctggatttgggtagcatgaagcagtgaccgtgtgccccacacccagtgagcagcaagaaccccctctaggactggtggagctggaaccatcattaaaggataaactgctcatctcaaaccagaggcaattaagtgacagagggttctcgatccgacgacttcctttccnaaaaggccccttttttttttttttttgggaaacccnaggntttgggggggggcccccccacttttaagggcccccaaaaattttt

SEQ ID NO: 2181 - DNA, 540 bp, Homo sapiens
  misc_feature 17, 21, 37, 43, 116, 120, 124, 127, 130, 134, 136, 152, 154,174, 176, 183, 210, 228, 239, 276, 404, 410, 411, 413, 414,416, 435, 452, 461, 468, 481, 487, 492, 494, 496, 497, 501,502, 505, 506, 517, 520: n = A,T,C or G
agctcctgcttagactnctgnattcctctaactgagnatccanttaaggaaccaatgaacatggagggaggatgaaacctgatgggcatcggggacaaggttcccatgatacagcngcantaanagnctntttngncttccttgctcactgntnaatatggctgaactacgcangnggtccanggagacttggagcagcctgtctgaggncactgaataatcccaganacacatccacnaaactgagccaatactataagcacagaacatttttanaagctgtgggacagaggaaggcccttcccaagatattgcttcgggacccagaatttaaacattcaccattggcttccggtcatgcaggctgtcacatgctcctgaaaaagaagggctgcgtgattttnaaaaanncnnantttttttttttttttttcnaaaaccccccctttttnttttttggnggggggngaaaaagaaaaantggggnggggngntnntccnnaannccctttttttnctnttggggggggggaaaaaaat

SEQ ID NO: 2182 - DNA, 416 bp, Homo sapiens
  misc_feature 392, 398: n = A,T,C or G
ctctgaaagatagttaggatgagaaaacgaccctcattgtaaagatgaagaaaccgaagttcagagaagtcacaaaactacaaagtggcacaccccaggctagaacctccttcctctcatttgaagggccaccaaaccagctgttcccctcatggaagaggagcatagacataaaatgtcaaggcaatggggaaggggcagagaaaaggcacaaacacttggaggagagacagaacaattaattggcacaaaaatacagtattggtgtcaggaggctttggtgggcttggaaacatcaagcagcagatctgaaggaaatccagccctggcatgaaagaaacggggcaggccaggcgcagtggctcactcctgtaatctcaacattttggaangcaaangcgggtggatcaccttga

SEQ ID NO: 2183 - DNA, 469 bp, Homo sapiens
  misc_feature 30, 31, 33, 38, 42, 51, 55, 58, 59, 61, 68, 70, 78, 333,391, 414, 417, 426, 432, 435, 444, 447: n = A,T,C or G
cctggcagaatctggccaacttggccattnntnttggnccgnggttaactntggnttnntntcctggntntttgtttnggcctgcaactccggttttgcttccttgcctgccccctggcttaaaagaaaaggacggggagtagggatctggaaggacactggcccccaaacagggaatctgagcaccagcagccacgccccagtgggttaaccttaacccgtgcccatgttaaacgcttctgggtggcgtaagcaccgttagctatgggtagctccatggggatcatgttggcatccacctatattgcaagttctgaaatgataacattttanaaatggatggacaaaatggatgcccagggttaaagaaaaaagtggttattaaaaggcnacaccgaaggtccttcaagtggntgnaactggttnataacntgnctgtggtanggnggataccccaatcttccaaagg

SEQ ID NO: 2184 - DNA, 608 bp, Homo sapiens
  misc_feature 14, 15, 25, 30, 31, 33, 50, 58, 60, 155, 159, 184, 191, 211,224, 226, 309, 406, 412, 415, 448, 450, 467, 483, 527, 538,541, 562, 567, 573, 574, 579, 591, 594: n = A,T,C or G
gaagaactgaccannacccctttangaacnngngggtcttcaaaaggganaagtgggnancctcaaagtgggggggccaaagggccctttggtttggccacattcaacggtaaaaaaatctttaacggggtcttttaaatggccctttcacgggnccanggaaaccttcaagctttcaaaaagnaaaaacncaaaaccgcgtcaatggctntcatttaaatttncnctttaattcggggcttccaaaaggaaggtgggaggaaatagcttgggtggctcactgtcccaagacactggaagaatgggcantttcaaagaatttttctcttggcaattctgggtcctcttgaaacaagactttggaacctttggtcttgcttgggtttcccaaacccctggggttacnacattnaanaaaccatggtgcctccaagggaacccttcaccntnttgggaagtcttggaanggtttgaagcccccanaggaaaacctcttatggtcttcccattatttttccatttccaanaacaacccttnttntttttttattggaaaaccccnttggngaaaanngggcntttaacttcaanttntttttaaaaacatt

SEQ ID NO: 2185 - DNA, 174 bp, Homo sapiens
gttgcctcactggaagccaggacacctatggacaccttaaggcgattttctctggcaagaagtggagatctgatacagacttttcaagaatgtctcattgctttagacaattccctgacactacctgtctggtttctttgattagcaaaaataatcatagtaaaaataccaatc

SEQ ID NO: 2186 - DNA, 399 bp, Homo sapiens
  misc_feature 355, 357, 360, 362: n = A,T,C or G
gaggctcagtccaacagcccttgaagaaaagaattccaccaccaccaacaacaataagcttggaagtggctttttctcgaaataaaaccttcaaatgagacctcagccctagacaccaccttgattatggccttgtgagagagattctaaagcagaaggcccaggtcagctgtgcccagactcctgattgaaagaaactgtgaggtactggccagacgaagtggttcacacctgtaatcccagcactttgggaggccgacgtgggtggatcacctgaggtcaggagttcgagaccagcctggtcaacatggtgaaaccctgtctctactaaaaatataaaaattaacccagcatngnggngngtgcctataattccacttctccaaagcttgaggcaga

SEQ ID NO: 2187 - DNA, 457 bp, Homo sapiens
  misc_feature 367, 424, 444: n = A,T,C or G
gaaagaagcagacaccgagggagaattttaaagacttcaaagagcccgagtggactaccacatccctgtagctggcagtcctatagctggcggtcctacttgtccagtaagcttccaaacattggctcctctctgaaaaggtcaccctgcttttcagacagaatttgtgactctcggcagctgggaatactttggaactgaagagaacctattaggagagagaaaaaacagagtcatgattaagcaaaaaaaaatggagaaaagattcacctctaaattttatttaatgacaacaaaaacacacaacatttctctttgattcataacgttaataaattctacttatcgtttgcaataattccaaggngttctaaaaacatctttatattaaaaaagagttccatattagtttgaattacttcangaaaaaaatggcctattccncccttccaagctt

SEQ ID NO: 2188 - DNA, 431 bp, Homo sapiens
  misc_feature 11, 23, 42, 48, 58, 66, 97, 131, 235, 251, 275, 289, 306,309, 315, 332, 336, 354, 358, 380, 383, 391, 393, 414: n = A,T,C or G
gggatggatgnggtaccagcaanacttaccaatgagtacctngaccgntcttcatagnagatcccnctggcagcaggccatgaaccacaagcctctntccatcaccctgctttccgggtcttctccagctncacttggtctgatgaataattccaaccagcacttccagaagcttgagctgctctttggctttgataacagctagctttttgggggttacataaacattcacatnttttgtaccgctgttngacaatgactcctggcttctgatnggactgagccttanaaaggatctgggccatnggnatggtnttttttttattgccccncttnggtaaaaaacctttcctncttnaaaatttggggaaccgcttganggngggggcananattttttttttttttgaaggntcttcaaagaaaaaacc

SEQ ID NO: 2189 - DNA, 618 bp, Homo sapiens
  misc_feature 13, 42, 47, 51, 62, 63, 67, 84, 87, 93, 110, 111, 114, 155,165, 226, 235, 255, 262, 286, 291, 344, 356, 371, 417, 445,494, 511, 528, 531, 544, 557, 560, 564, 580, 595: n = A,T,C or G
tcagaaacttganggaaaagaaccttgggtcacttaattctncgccntctnggaaaatcaanncttngttatggacctccttgnatngatccnacttgagaccccaccannttnggcccaacccttgcttgggggggaattaagaaaacccttcntcttgtccanaagttaaaggggggcctggaattggggttccaagggtcacatttttttgggaaccttcaanggtggacanggcccagaagccccaaggtncccccanggacaagtggcagccacctttgtnccaangccgggcccttccccgtttcttggcttcccgggcttgaactttccttgggaanaaagaaggaaanggttcattcttgaantttgccagaaaaacttgggaaagccaagaagaacccccaagtttanggaagcctacttaccaacttatttccanggccaaggaaaaagaacaagttgggcctttgggaattgggggaattgtnggtattttggaaaagtngggaagacttaacccanaanggttcctttgggnaaaatggtaccantcntttnttagctttccccaaanaactttgcttgcttnggtgggggaaatggttccaaggt

SEQ ID NO: 2190 - DNA, 435 bp, Homo sapiens
  misc_feature 388, 391, 401, 410: n = A,T,C or G
gaaagaaccttggtcactaaattctacgccttctggaaatcactctgctaatgacttcctgaatgatcgactgagaccaacagctggcccagccctgcatggaggagtaagaaaccctcatctgtcagagttaaggggcctgaatgggtacaggtcacattcttggagctcaaggtgacaggccagagcccgggtccccaggacagtgcagcaccttgtccaggcgggcctcccgtttctggctccgggctgagcttcctggagaagaggaaggttcatctgaattgcagaaactggaagcagagagcccagttaggagctactacaactatccaggcaagaaagacagtggcttggatggggatgtggtattgaaagtggagactancanaagtcttggnaatgtcatnttatactaccaaaacttgctgctgg

SEQ ID NO: 2191 - DNA, 282 bp, Homo sapiens
  misc_feature 107, 110, 126, 143, 178, 190, 218, 223, 237, 245, 265: n = A,T,C or G
taaccagtgaggaactgaggtctcccagcaaccacctgtgtggagttggaagcggcgctctctctctctctctctccagcaaccagtgaggaactgaggtctcccancanccacctgtgtgaagtnggaagtggattccttancctcagtcaaaccttgaaacgactgaaaacctggncaacagcttgtntaaaacctcatgagagaccctaagccanactcncttacctacagaancctttatntgtatctctgaataaatgtntgttattttaagctact

SEQ ID NO: 2192 - DNA, 451 bp, Homo sapiens
  misc_feature 428: n = A,T,C or G
aacgtagctgttttgaaaaaacaaagcatatgcattcttctcaaatggcaacttaaagaaacaggagggcaaattctcatttcttttggaaagtaaagattcctctctttggtaaaagaaacttctttgcattcactgaacaaccttcccttaagagggaaccaacaccgcctgatgatgggcaaactgaggcttacagagatgggagactgcctgcacgggaccattcagctcagaaacagtggaactagaacttgaggccatgcctttcagagctgctcccatcttcttactgtccatgccgcctctggcactttataaatgacagagggtccgatatgggcatcatcacatggttacccatggtaccctaaagtgcagaccccaagcctctcacctggacatctgccacaaaagctgtaatgcanttgaaaattggtcttcccttgtg

SEQ ID NO: 2193 - DNA, 278 bp, Homo sapiens
  misc_feature 32, 38, 40, 51, 57, 58, 63, 68, 76, 103, 180, 210, 234, 238,241: n = A,T,C or G
gtgttgtgctgatgcaggagacaaccgcgaanatgggnanggaatgagaangatacnncgtanggganttgaagcnaaagatcacgctgcctgcctacaccangaaacagccaagaccccccttgcacgaaccaacattcttccaccctctccaacttttttctggaaccccttcacttncaacgccctcaatgtacacttcactttctngtgctcttcctaagagagtagtgntttnttnctccccaccgagaaaaaaaaataaaagcaacaactgg

SEQ ID NO: 2194 - DNA, 293 bp, Homo sapiens
gtccaagattttgagaacccagattcaaataaagaaatagatatggccaggtgcgatggctcacgcctgtaatcccagcactttgggaggccgaggcgggcggatcacgagagacagggtcttgctctattgtccaggctggattcaaccttgtgggctcaagtgatcctcctgcctcagcctctggagtagctgggactacggatgcataccaccacattctgctcatgccctatgtattcttttgtatgtatgggtgtaaaaacagagataaaaacagagatatggatgcc

SEQ ID NO: 2195 - DNA, 475 bp, Homo sapiens
acacagcaaaggctgagatttcagagacttgagggctattgggagctcagaacatggcatcaagtcccaaggaggaaaaactatggatcctggaaccttgctgttgtcatacttgggggcctgtcttaaaagtctcacttggtgatatgggctgagtcatgtccctccccaaaattcttatgttgaagtcctaatccctagtacctcagaatgtgattagatttggagatagggtctttagtgagataattaaggcaaaaggaggtcatatgggtggggcctccttacagaggagactggtatctctgtaagaagaggaatgaggacagagacacgtacagaccaagggaccatcatatgaggacacagaaagaagggatccatcttcaagtgaagaaaagaggcttcaggagaaaccaaacctgcccacatcttgatctgggacttttaaccttccaaaatttaaagaaaataa

SEQ ID NO: 2196 - DNA, 458 bp, Homo sapiens
  misc_feature 422, 438: n = A,T,C or G
gacaagattttctctggtcttctgtttcccatttctaaaataatgaaataacgccacttcagaagttcctaacgaggacaaaatgagaggtcatacgccaagtgtatcaagtacacagaaattacctcatttccaaagggaagattggatgatactccacagccaatattgacttactgaagatgttatcaaatcctctgcctttcctcataatgatatgagaagataaagacgtgctccgctacagagtcttcaaaggaagcagaaaaagtataatacataattttaacttaagaggaacactgctggacatcatgagaattccatacaatgagtgtcacatctatcagaaaaccaagggtatgaactctaaagaaatagaagatggtggtgaacagggaccacctctctgcctgatttgntttctgcctaggaggnccttcataattgcatgggtg

SEQ ID NO: 2197 - DNA, 523 bp, Homo sapiens
  misc_feature 205, 407, 410, 421, 457, 465, 473, 485: n = A,T,C or G
gtgcggtggctcacacctgtaatcccagcactttgggaggccaaagtgggaggatcgcttgagctaaagattttgagaccagcctaggcaatatggatgtattatggtattctctggaaagattctgtgaacaagcaagacacctgtttcaggtcttgttaaataccaggtctttccatttcctttaagcctttcagagatttangccatgtcatcatacctgatcacttcatacctgaaccccacaagggcagcagcatcctccggtgtctactacccgtgagaccccctctagagaaagttccagaaaacaagatgagttcaaagagttcataagggacttttgggggaagctacactattattagttaacactgaacagggagcccggagatctagattcttgntgnatttgccctgntcatatgactttggacaaaccactcatcttttaagnaccctcanttcctcanttatttttgganaacattggaagtaaaggacctttaaagtctgtttaccc

SEQ ID NO: 2198 - DNA, 475 bp, Homo sapiens
  misc_feature 462: n = A,T,C or G
gcaaaacagaaattccattttgatgattaaaaggaggaaaaattaacttcatggtcctgacccacgttcaacttgataagagaggagagagcactgtgtgaaggcaagagctggtaagctcagacaacagaaagaccgggactaactcctgctcatcacttcactacacggccttggccatgctgctgatcttcacagcatcaggttcctcatgggtgatttgggaatagcaactggaccaagcctcacagggtccttcatattatttccactcattattgttgaaatcttccagttttctcattattcccaatgcttcaaaataaaagagaaatttagtaagattaaataatggaaaaaggaagccaaagaatatccagttacgatgttcaaagagataagctggccctgaggcatatttatctgtcctaaaagaacttcccaaagagaaaattaaagctnttccaataccttg

SEQ ID NO: 2199 - DNA, 527 bp, Homo sapiens
  misc_feature 467, 510, 512: n = A,T,C or G
ggcatgaactcagggagcgagcttgggaaattgtggaggaagctgtttaaagggattcccaggctctcggtgagccattttggtttctattgtgggacttgtgtgctgttggggcgcccacagatcccacagggctccagccttggcaacgacatcgaccaataccccgtggttttcaggaatgccagcgaccagggctcctggatgcagctggagatgctactgcggaagctctctgacctggtgtggacttcagatgctctaagtgataaggtcaccctctttggatttggatcagaatagcaaggaaagtgtttctatcactggaaggaggataatcagaccaagggctccaaggaaatactgcccacgtctagtgcaggagcagaaatcgaagtcatccatcagctagcgtgtggacaagctcactattcacacaaacttaacctaacttaagtcaatccaantcctatttttgggtgggtaaagggcaggaaggaaaattgtaanancaagctggtactgaa

SEQ ID NO: 2200 - DNA, 505 bp, Homo sapiens
  misc_feature 448: n = A,T,C or G
tatgctccaaccagcagcgcggaccgcaagtggagcccggcaattggaaagttgcaaatgcctggatgctacgttttgcatcttctttagatacccttgactcgtacatcctgtctgggctaatgttgttttctgcttgcagtgtgtctggagtctcaacaagtgcccaagccaccctcaaagggtcactccttgtttcaagagcacttgtgcttgccttgacctctctgtcgctctctgattccacttaggaagctgcttagttccatttttcaactgaaaaattatcctctgcttcaggccactctgtcatactgttttgtgtagtgttttaaagctaatttgaactaggcaatgtcttagccttagatatagacagataattttccagatcagacaagctatagtaaagcttcaaagggaaaacttttattcctaaagagaatanaaaactcatctggggtaatcataattggatttaaaaaatgacccaagttgaattttt

SEQ ID NO: 2201 - DNA, 377 bp, Homo sapiens
  misc_feature 205: n = A,T,C or G
acaaaggcttgctctgtcacctagactggactgcagtggcacgatctcggctcactgcaacctctgccttccaagttcaagcaattctcctgcctcagcctcccgagtagctgggaccacagacctgcaccaccacacccagctaatttttgtatttttggtagaggtggggtttcgccatgatgcccaggctggtctcgaactnctgcctcaagtgatccacctgccttgacctcccaaagtgctaggattacaggcgtgagccaccacacctggcctaattatatctttctattaagccttacctaataatagtaagaagtaggattctctttggctgggtcactattcaataaaatattaaagtcatccatgtg

SEQ ID NO: 2202 - DNA, 533 bp, Homo sapiens
  misc_feature 16, 28, 29, 34, 36, 40, 42, 44, 51, 56, 58, 61, 66, 68, 76,87, 120, 213, 258, 273, 282, 286, 311, 320, 327, 336, 358,362, 365, 366, 372, 406, 422, 458, 470, 479, 483, 485: n = A,T,C or G
actcctgcttaagtanaaactgaaactnnttttngnaacntntnttggctngaacntnctnttcangngtgtctgnaagctggcctnattccactttgtgcctggaaaggggacacacangccctggttcctggactgaaagcacgaaacaggatctccctgtgttgcccaagctggtcttgaactcctggctcaagtgaacctcctgcctcntcctcccaaagtgctgggatgacagtgtgagccaccgcacccggnctataacgaaaaagncttgattcncttngcacattgagcctcccctttttggnatctttggnccccaanccctgtagngagaaactgcctgagaaaaaancggnggnnacacantggagaactggaaaaaaaaccccggagtgggaancacatctggtgccccnctccctgacatgaatgtgaccaactctggttttaanatttttgacatntgaagccanaaantnccctttctactataaggggagtggaagggggatttccacactttgtac

SEQ ID NO: 2203 - DNA, 520 bp, Homo sapiens
  misc_feature 465, 503, 505: n = A,T,C or G
tcccacagccctgtgaccaaaagactgggagtgtatgtcaggcctctgagaccaagccaagccatcgcatcccccgtgacttgcacgtatacgcccagatggcctgaagtaactgaagaatcacaaaataagtgaatatgccctgccccaccttaactgatgacattccaccacaaaagaagtgtaaatggccagtccttgccttaactgatgacattatcttgtgagagtccttttcctggctcatcctggctcaaaaagcacccccactgagcatcttgcgacccccactcctgcccgccagagaacaaaccccctttgactgtaattttcctttacctacccaaatcctataaaacggctccacccttatctcccttcgctgactctcttttcggacgcagcccgcgtgcacccaggtgaaataaacagccatgttgctcacacaaaaaaaaaaaggccagngaggccaattcaagcttggacttaaccaggctgaactngntcaaaaggggggggg

SEQ ID NO: 2204 - DNA, 508 bp, Homo sapiens
gcctgactcccccgcagaggagaagcaaaacaatctcttagaagcaaatgaatcaattcaccatttcttgaagctgcagagttctatagctggcttggggcaggtgggaaaagaagaactcttctcccattggaaaatctaaggcatacataaatttaatgaagtacaaactttctgtacagatggagcataaacaaatggcgtcactagatccaccagccattcattcaagctgtggacagagcccagcggccgcagcaccggacaactgagtgcttggggaggctcagccctgacagcccctgcacaacccaaatcagttggcaggtcacagaggtgaggccaccaagggcttctgacccttgtggccctcccagggctaccctccttgagtccatccttctggtcaaccagcttgggagccttagtgagtggcagggttgttgctagagagaaagccctggagtcttctctgctctaatgacttaaaataaagtccaaactcctc

SEQ ID NO: 2205 - DNA, 229 bp, Homo sapiens
ggaaaacaatggagcttcctgacatgtgacactgatgctgtttcactcaacaagcaaaagtcttgctccttcttctactggaatatcagtgccatgagagctgggatctttgttttgatctctgctttgtccccagcacccagcacaatgcttgacacatagtaggtgctcaataagttccactgaatgaatatacacaaccaatcctgataataaaagtttgttattg

SEQ ID NO: 2206 - DNA, 298 bp, Homo sapiens
  misc_feature 212: n = A,T,C or G
gctattgtcctccagttcctagcttaaaactgtacgggacatttccagtatagagcctgctgagaatgaacatgaaatcaaggacatcacctgatgatggattatgtagatggcgaaggtgtggtggcacggagacctcttggtgaccaagccggacactgagcaatctgtcagcagcttatcaaaagaaaacacaagtccaaactttgtangaaaatacctgattaaaatcactctttcagggggtatctagtacatctggcaggccagtctggtatttaataaatcctgctccttc

SEQ ID NO: 2207 - DNA, 299 bp, Homo sapiens
acaaacaatgattcctgaagaaataataatgaaccatcacctttgatgtaatggctgcctgcactgtcgagatgggagtgtgccaagatcagagattaatgcatattaaagaaggtgaagagaatttcacttctggatgatgtgagcaccctgcagtttgctgtgtacttttcatacacttatgtatttatctaaaaccttccatgatttttttggtgcagtagtatacagaatctgaactgttataaggtcaactgtaaacaattatctaatagttattctaaaactttacctccaat

SEQ ID NO: 2208 - DNA, 435 bp, Homo sapiens
  misc_feature 25: n = A,T,C or G
gttctgtgctctgtctttcctctanccctcagcttaataggttgtgaccaaggcaattcaaggaattgtcccaggggaggggaactggtggaatgagtacctggcaaaaggaaagcagttgtcatgactggccaagactaaaggtcagaagactttcactggagatatccctccctatgcctggaagaaaggaatattcttatctctgaagacattgggaaacacaataatagctgaaaaacaggccttgctaacttctctccagtttattattagatgatatatttttatccaatcatatttctccatcactacccacttctccatcagaactagccttaaaatgcataggtttacatattttttagtcttcatttccacagttcccttgtcacactaaaactatattaagtaaatttatatgtttttctcttg

SEQ ID NO: 2209 - DNA, 334 bp, Homo sapiens
  misc_feature 11, 22: n = A,T,C or G
atacctatctntagtctattcngatgacaaagtcaataacaggacatttaagagtcacagctctgaaaacaacataaagcatcatgggccgtgctagacatttaaatgcaagagccattctcttcaaaggactatgaagacttggaacaaaacatcacagtcattcctttgtactctggatgccgaatgttgcaatactgtctgcccgcgaacctttccattcttacagcaaatcactcgtccataaagacagactgtagtgattctaatgcttctgtaaaatatctacttattggcactgcatcagaataaatttaactttattttaaatgct

SEQ ID NO: 2210 - DNA, 567 bp, Homo sapiens
  misc_feature 20, 44, 53, 72, 83, 115, 116, 134, 138, 143, 160, 173, 176,214, 255, 291, 311, 314, 320, 327, 332, 339, 387, 388, 402,411, 415, 418, 427, 439, 444, 472, 474, 481, 485, 487, 496,497, 500, 515, 516, 520, 546: n = A,T,C or G
gagctggggatttcaaaacngccccgggcatcatgcctccggcntaattttcntatttttttgaagaagagnggggtttcacnatttttgccccacggctgggtcttgaactccnnacctcaaggtgattcccngccnttggnctctcaaaagtgctggnattacagggcggngancccacccccccccaaccaaaaacgtttttttttcttantttacccgccgggggggaaaagaaagatttatttttggggnttgctttttctccccttggaaggaacaagaaaaggnttcccttcttttcttgattnttnaaaagnaaaactnacttnacttggnggtttttttttttttttgcccctcaaaaatttgccctaccccaagttnnctccctggcaaggnttttttttntttnttnaataaaaanaagcattggccnttgtnttttcccccccccttttgattttttccngnccccttncttngncccttaaannccnttcaaggggggtggnngttnccctttttaaccggggaacccccgantttccaaatttccttttttgt

SEQ ID NO: 2211 - DNA, 652 bp, Homo sapiens
  misc_feature 583, 610, 618: n = A,T,C or G
cacttctccttcctgcccttgtatgaagaaggatgtgtttgcttccccttgtgccatgattgtaaatttcctgaggcctcctcagccctgcagaactggctagagcaatgtatcttaggctcacttaaggaagctgtagagatgagcccaaggagggaaaccagaagagccccccaggctcaccagttgtttgttggctccctacaaacatgtcattcaagtggctaatcttacaacagcacaaattcatctaaccagagatactctattatagcaaagaagaaagataatttcattgagccatcctgttttacaggattttccctcctggtgagtcaaaatgaacaagaagtaccccaggacctcccttccctccttggcattaatgagatgaaggcaattaactcacatagtataaatgaatcatttgaggtgatgactgcattttaggcaaatgatgactttcttggtccattggtttgcaagtaaaagttacacacattgaaaagacactgaaacagatttcctaaatgcttcattttctggatgcaccaatggtgacctactatacatggtaaatggntttaaaatatcaccttaaaaataaaangaaacttncagctactaactcagctcttgatgggctatgaaa

SEQ ID NO: 2212 - DNA, 485 bp, Homo sapiens
gagctgattcttcttaaaatgcattgccacgttatctctaacgttggctttctgacttccccgcggggctcggaggaagtaacccagtttcttaaggaaaaatgagagataaacatcacaacagaattctaatgacactgcaacaaaatcaggccaaaatgaacgaaagaaagaaaagaaaagagaagagaaggaaaggaaaagaaagaaaagcctttggtgcttgctcactacaaaatgaacaaattgcaagtggaaaggaaaatgtttccttttttgagtcccttcatacctagtggaatttggaaaacttaggaatccttcaataacaaacactttgccaagtgcaaggacttggaatttcttctctactgaatctactgaaccatgggtcttaattaggtgaaacagcatcacctacagtgggatttggttgggacccccaagtcaataatttgattgaataaagctctttggaattttcc

SEQ ID NO: 2213 - DNA, 667 bp, Homo sapiens
  misc_feature 515, 588: n = A,T,C or G
gatggttagctgggcaatcaactactcagaagacgatgacatttcccagtcccctcatagttgagctgcaggaaatggaagcagttgaatgtgaatataaatacggatgtccttagagaactgttgtcataaattacatgatcaggaaaagagcaaaacaatacaaaagatcataatctcaaaaatctcctattgccatcgcagaaaacagatccatcagacaacacgcatcccatcctctgattcaaagaagtgatgctcgtttgtattaacgctcctccatgcatagaagggctcagcaccacctaatggtgctatattaaggatcatccaaaccaggtcaaccttctgagaggttcccagtcctggagacaggtcaaaagtgaagctcagactggtctggcacttatacagccattaggaagagatgagcagaaaagctctaagattccacagcccagactggctatggatattaacgacctgcctccaaccatccatacctgttcttttgntaatctggttttaccaccatgcaagagagacaaccaaactcatacagtcaaaactgagtcataagaccctctnccaattttttattttttggttctacttataattcttacttttatacttctaaaacaattctattccctggtaaaagact

SEQ ID NO: 2214 - DNA, 679 bp, Homo sapiens
  misc_feature 508, 516, 593, 664: n = A,T,C or G
ttctggaggctggagagtccaaggtcgaggggcctgcatctggcgagggccttattgctgaatcatcccacggcaggaggtggaagagcaagagagagcgagggcatgcgcatgtgaacaagagaaagagactgaatttgcagcctgaagcccttctatgattggcattaatccattcacaaaggcagagccctcatgacctaaacacctctcactaggtcccacctctcaacagagttgcattggggattaaattcccaacacacgctttttaggtgacattttcaaaccatcgcaccttcctagtgcccataggccaggcactgtttctggggacttctgggaattaacacagtaatcctcacaaccagcccatgaagtaggtgttattgttaccacctccatgtcagaggttgagaaacggaggtgcagagaggttagttagcatggtgtctggcactggcatctatctcttactactacacctaattgctcaaaaattttgaangcttccanggcaagcgacatcacaaatgccagcataatagcaagtagattctttcaaagacatgaacatataggaaaatacaagntttactcaatttctcaacatttttcaaactggggtccttggatttgggtttggggtaaaaattaaaaggangggtctattgccaag

SEQ ID NO: 2215 - DNA, 592 bp, Homo sapiens
  misc_feature 431, 535, 544, 550, 571: n = A,T,C or G
atggatagctctctgaaagcgggaagcatgccttgttcagggagaagagatcttgctgacccaccccttctctttctttctgacctgaatgtggatatgtggtttgcttctgtggctgcaatcaggtgacatgaggcaccaaccattggaccaagaagacaacagccaaagacagaagagcagaaaaataaaaggaaaaggcctgtgttttgataacatcaatgagcagcagtaccagtgccaatagtcacctgtctccagccttcttgtgaatgagatactacaggtctgtattgcttgagccatttctaactccagaatatatttaagagtttcatactgaagttgaaccacacatctttctttgaacttcctaacaggcaaaacaactgcataaaagagatactcaattaagttattatttgcattgnctttgaggagaaaattgatagttcttcaagagaggcactggttcttgtgaaacttaattctttaaaaaatggcttgggtggggcatcataaaaagacactgagntatgggggnaactgnatttaaatcatatccccaaantaaatgccaaaatagtttcat

SEQ ID NO: 2216 - DNA, 316 bp, Homo sapiens
  misc_feature 14, 22, 27, 30, 31, 34, 42, 59, 62, 106, 123, 125, 127, 140,142, 183, 193, 230, 256, 275, 276, 283, 296: n = A,T,C or G
tttttccggcaagngacttganaagtngcnnccngaaagggnggcggtggcttgcccanacncggtggggaagagccttgagggtgcttgccgccccaggtgacangacccgaagattgtacnanancactctaattgcncnaaaataggcactatccaccaaacttcctggccttgagaatngtttaccaanaacttcaaagatccctcttgcccacatcttgaaaaangccccccttccctataaaaaaatcanggacccccttgcttaaagnnaaacaantgccccccttgtnaaataaaattgttggaaaaa

SEQ ID NO: 2217 - DNA, 184 bp, Homo sapiens
  misc_feature 7, 10, 12, 22, 23, 27, 28, 29, 121: n = A,T,C or G
gcaccgngancntcactcattnncgannnctgcattgttgttggctgatgtcatagactgttcctctatgatcacaagaattccctatttagaactgcatatgggtgcccgttgggtaacngtttcaagttgaaagaattttgcattttgtgttattgtactagaatgaaataatcttaatccg

SEQ ID NO: 2218 - DNA, 592 bp, Homo sapiens
  misc_feature 30, 36, 37, 48, 51, 61, 72, 74, 75, 392, 518: n = A,T,C or G
gactctggggagctcctgcattaagtcagnaactgnncattaccaganccnagcgagcttntgacaatcgcncnntagcccttcggctgcaatcattctttccgtcagagtcatcatgagctgacgggctttggagctggaacacttaaactggtccacaagaaagtgctggatgtttgccatctgtttccagaaagcttccatctgtgaaatgagcacaagcagcaagaagtgaggtgaaaaacttacttaagaaagccaaacggtgcgtgcttgggaattacaattcactccttatcacaaacaaagattctaaacaattctacagtttcagtgagtttatcttggcaacaatcaccgttctacagtgaagttctttctggttccattgnctggttccagtgtcaagtcagttttgcaatggtgtttcagcagacacgagagcactgctgctaaggaaagaaagcagtagcttgtccagcctacagactcttgcacaggtcattacagctacctangggctgatgaaatgtgacaatgggctcatggaagctttggcaattttaaatgggattaaatactttcctgaagt

SEQ ID NO: 2219 - DNA, 167 bp, Homo sapiens
  misc_feature 25, 30, 31: n = A,T,C or G
tctggggagctcctgcattaagtcnactgnnatcctaaacgaaggcagacatcaacatttctggattcagggtccagagtgctcaccattacaccatggaacctcaaaccagacatcaacgtctctaatgagtctttctttattccaataaaagaaaatggtcagtg

SEQ ID NO: 2220 - DNA, 477 bp, Homo sapiens
  misc_feature 374, 380, 407, 425, 432, 448, 452: n = A,T,C or G
gaacaagctgacattttataaaggaagcacagttgactcttggacaacacggatttgaactgcacgggtccacttacacatggattttcttccgcctctgacagcaagacaaactcctccttttccgcctccttcacctcagcctattcaatggtaagatgatgaggatgaagacctttatgataaagaatagagcaactggacatcagcaaaaaagtgaatcttcaccaaaaactcccaccttatacaaaaaattaactcaaactggaccacagacttaatgtaaaacataagactataaaactttcagataaaaacagaagaaaagttttcaggacctagagctacaaaactagttcttagaattgatgccnaaagcnccaccccccaagaaaaattaattgggnctttttcaaagttaaaancctttgntcaccaaaagaccctnttangcagatgaaaagagtagctgcagac

SEQ ID NO: 2221 - DNA, 188 bp, Homo sapiens
gaaatctggaccatctgctggggagaaatctgtttctttgcaggataaaatgctccctacaaatgtaaaagcttttatatcccaggactgttattcaaagcacctttaagctcagcttcttacagcgccgtctgaaaaaatacaaaacaacagctatgtcttgcaagtaaaatcaatggtttcctcac

SEQ ID NO: 2222 - DNA, 682 bp, Homo sapiens
  misc_feature 529, 589, 607, 659, 669: n = A,T,C or G
aagggtctgcagagtctgcaggtggcgcgcacattcgtcatgatgctgaagagatgagcagagtgcttagtctggggcccagcgcactcatctggaagcatgtcagcggagccgcgggacagctgccacggacggcagtggccccggattcatgtcccgagtctgaagagagctcctccctggccttttggtttttggggcctcctagtgtcctccccacacttcggtttaggtctctgtcttgcagcatcagcgactcccacttcttttctggcagggctgtggctgcagacagcatctccagctagttcacaggtggccgccctaggccacgggctttccctggggatgaaggaccttcaaatggaaaatggccactttcataggactgtttcaggttacagggtcaccccttcctgtccctaccttagactcccaaccccatcgctgcacctggcctggcctcctctggaaggaagctcagatttggagcctctgcagggcagggagcctgttggaaccagcccanggccagccggctcattcctggaattcctacctcctctcactgccctgggtttggcaccangtgctgagtgggcctcangccaactgtgggcatgggctcgatgccgctgctttcttcttcacatcaaggnattcagccgnattctaccccaaa

SEQ ID NO: 2223 - DNA, 663 bp, Homo sapiens
  misc_feature 569, 576, 611, 640: n = A,T,C or G
tgattggctctttactggaaatatgcagaagtgactccctcccagaaacagccttgactggtgtcattccagcctcacttcaagggcagagacctggttgtcagtgagatcatcacagccacagaggaccaagggccccaagagagtcaacatgcaatgtcagcaatgcagtgccttaaagaacatctgtctacccatgactaccacagtggagaatgaggaaattgagacccatagaggaaaagtgaactagtcaatatcaacccccaagttagagaccaagggtaatggagaaactttgatgagagtatgggctgctggtaactaacttgtggactcaagggcctcacaccctcaaggtcggacaacttccccaaaatgtcacattctgagacaggttaaccaagggcttgggcctctgctgctgtttcctcttcctttcaaaggcaagcaccatggataggcctgctctgcagctccaacccctggggtccccagggtcatgctcagtgcaattcttctttctggctggacacttggagcttgatgttccccagagttctggtcangctcttnccatctctttgcctgaaaagaaactcaaggccttnccaagtgggagccatcaccactggatggncagcacccaaatctcacccccga

SEQ ID NO: 2224 - DNA, 580 bp, Homo sapiens
  misc_feature 2, 6, 10, 14, 18, 22, 25, 26, 27, 30, 39, 42, 47, 49, 548,556: n = A,T,C or G
gnatcntccncttnggcntccnaannnttngggatcccnccngtccntntcagactgttacaactgaagaaagggccctcggagatcatccagcccatccccctcatttcacagcgaagatgtgagctggaagcttcacagaaacacacagctcccaggcttcagtaagtaatcatgtagtgggttgttttttttctgtccctgagaagctgggagtaggtccttggatgcattacagatcaagagacaaaatggaacagtaattatgattctgaaattgctcataattagatccacagccaggcagtctcactcagattaatgagactgagtttctgattcccagtggcccataggtcagtgaaggttcaagaggtgctaattagatcaatgagtttttttagttattcatttgataaagcattgcatggcactgtgtgcaaagctctgagctaggtactgtggctgataaaggattactatatagtatgaatctgtgtttaagaaaaagaaccccccagaacctgattgcctggggatagaatccnatctttgntcaagttgaatgatgaagaataag

SEQ ID NO: 2225 - DNA, 278 bp, Homo sapiens
  misc_feature 89: n = A,T,C or G
gggagctcctgcttagtcagactgaggccctgccttcgatggatcaagctggcacccccagatcaataaactggctcatctggtcttgnggcctccatccaagtaccaactcagtgcaagaagacagcttcgaccccgtatgatttaatctccaacctgaccaatcagcacttctactccctggccccctacccaccaaataatcctcaaaaaaacccagtctccaaattttcaggaaagactgatttgagtaataataaaactctggtctcccgttc

SEQ ID NO: 2226 - DNA, 700 bp, Homo sapiens
  misc_feature 17, 18, 22, 32, 33, 35, 45, 55, 82, 91, 118, 120, 121, 123,131, 135, 144, 148, 150, 168, 178, 185, 191, 194, 207, 220,239, 241, 257, 261, 269, 286, 304, 311, 318, 332, 333, 368,388, 390, 411, 425, 444, 451, 455, 456, 458, 477, 490: n = A,T,C or G
  misc_feature 504, 516, 532, 587, 619, 658, 665: n = A,T,C or G
tttaagtactctggggnnctancctgcctttnngncatcaatttntttttttttngaaatgggaggacctttttcaacgacnctggtttgntttgtggcgtttcctttgtgggaaccngnngntctttttngttngtgagaaanttcngngattccttggaattttcncttacttttnctttgcntggtgnatncctttattgggtngccgggctggganttttttttgctttttaatncnattgtggtggtcttcnaaangaaaaccncttttagaagggcaaanaaaggcccaaaaaagccnattattncctgggntttcttcctttccnnggaaaaaggggaaaaaaaggacccccccaagccanggggccaaaggggggacccnanaaaccccgctcaaaggcccanccaaaaaaaccttnggccaaaggcccacccaangggcccnagcnnanaagggggaaaaagaaaaanttggaccttttgnaagggaagggcttnccttggttgttnttggaaaaccgggcangttggtattttttaccaaccaaattattgttttcccacctcttctttccctttgnctttcttttttttgggaaatgggggtttttcnttttttcccattttttcattttacccaccctttttggcntttgggnaaaaagaaattggggatttaaattgggattttctt

SEQ ID NO: 2227 - DNA, 353 bp, Homo sapiens
ggtcttactctgtcacccaggttggagtgcaatagtgcaatcttggcttactgcagccttgaactcccggctcaagcaatcctcccacctctggctactgagtagttgggattgcaggtcaagccaaaaagtgatcggccattcttttaccgggttccagccaactctgtccgctaacccctatgacagaggagatgggaaaataattgagctgctacctaggaaggcacaaacatttcctgtggtgaggacttaggaagcagtgccaggaatcgggccatcggaaggcctaagcacactgggcacaggttttctgcccctagcaagggactgacaataaagtcaagtgaagc

SEQ ID NO: 2228 - DNA, 266 bp, Homo sapiens
  misc_feature 10: n = A,T,C or G
gttagtgacntcattatacactcgagccagaaatctctccaactttttcatgctactcattcaagcaaccagacatcaggttccactactatcttcttcagaaaagctatccagatcaaagcagaagcccaactctcttctgctgcgtttcaacagggactgcttacgtccagatcatcccagaggattcctgtgttagctctattagttctaccttccttgagaactgctacatagctaccattcaataaaataaatctcagcgt

SEQ ID NO: 2229 - DNA, 679 bp, Homo sapiens
  misc_feature 442, 505, 562, 622, 624, 629, 654: n = A,T,C or G
cacacagcttcctgagcaactttccacctccccattcatgcctaacttgaaaagtgtgtgctgaatgtggatggacagtcattctagggcagaagccatggaaatccaaggactggactgaagaagatctagatgccgcatctctaggctatccgtctaggctatccggctgagacaaggccttctgcagcccagctcacatatggtatatttcagccagcgagagctcaactaactgcagaacatccagcactgcatgtcatatcgtgtcacccacttgctgagggcaagcccagcatggtttggtctgaagctgacttgaagagctgagagttcaagacttgtcactgggtcccaaaaaggccctgtgagcctggaggcagagcccagtcctgtctcaaccaccaggctcaggactgggggctttcccgaggatagagtnacacccgcgcgcgcacacacacacacacacacacacacacacacattcattctgtttgatggnggagctcctttcttatggagagacacttttcaataaaaagaacatatagggtgcttnttctgcaagctgcactggcctttcgctaccccaaaacctcttctattcagggagtccctntntgggntgggagcaccaacactggtcttaanaactccctggcattactttttccaa

SEQ ID NO: 2230 - DNA, 375 bp, Homo sapiens
agtctcgctttgtcacctatgctggagcgcaatggcatgatcttggctcgctgcaacctccgcttcccaggttcaagtgattctcctgcctcagcctccagaagaggtgggattagaggcatgcaccaccacacttggctgatttttgtattcaccatctctaccaggccaggctggtcttgaactcccgacctcaggtgatccacccacctcagcctcccaaaatgctgggattaaaggcgtgagccaccatgcccagctgctcaacatttcaaacagaagtttaattatgaaaagagaattaaatggcaatttttaccagtaagacataagcctaacatcattgactgagagaagtaaatgctgtcaaaagat

SEQ ID NO: 2231 - DNA, 232 bp, Homo sapiens
  misc_feature 17: n = A,T,C or G
tcctggcctccttcagngagatgttgagtaggtttagccagaatccactcctacccctgatgtttcctttcactgaccgtcccgccacgaccactcctgggctgtaaatcctcacttgtccttgctgtatttggaatggagtccagttctaaggttcaagagttctaagagtcctgagggctcatttctcctattgaaatagttcctgagtaaaatctgcttttatggctct

SEQ ID NO: 2232 - DNA, 571 bp, Homo sapiens
  misc_feature 330, 460, 475, 501, 552, 554: n = A,T,C or G
actgagccaaagccaaaatgaacatgtgccttgtactaagaaatcccaggattgtcacaacttgtgccagctgttgaggttgtgacacctgtgccagcatcgccggctctgcccactgtcatctgttccaactgttccatctgcactgtttgtaccaattctcccatttctgcatctgcaccttctgcagaaacgtttccaacaatgccagctgtgtcattggtgccaaatatgccagatgttctatttgtccaccctgggccaaatcaatgcagttttgtgctcattagttttagctggtagattctattttacaattttttgatttgnattttgattgaatccaggcaaaatccccctttcaaagattttgtgtctatctatccatctctttgcaaccccaactttatatctgacaacatgaagttggtcaatgttattcccgatcttattaaaccancccaatattaagtgngggtaggggcatttcctacccgtgtnagactatatatcgcaaaaaccatgcaacatagggataagttggcaaaagtnanttaaaaaagaatacact

SEQ ID NO: 2233 - DNA, 468 bp, Homo sapiens
  misc_feature 15, 152, 293, 314: n = A,T,C or G
tgggctcctacctcnagctcctgtgatctggtggtggggggccacccaccctcctgcttcagtgatcaagaactgaccaagcttgctcatcccaagcccccagccacaagcaataggggatcccggtaaaggtttgccgacctaagctggtngtgatgaagccatcaagatgatccctctttctgtttggagggtgctaaatccggcaggggccattgaagcctgggatttactaagcaagaagccttgccttgaaagatgccaccaagcacaagaagatgggccaaaaccanaggagcctaagaagaagacangaatctcaagttgatgatatcttgaagccatccaagaattccagcccaccatcttgaaagtttaaaaagtcttgctcaagggactcttgagggtacaagggaagggtaatacatttttgtatcaagggaaattggaaagtgggggcttcttttt

SEQ ID NO: 2234 - DNA, 146 bp, Homo sapiens
acccaggtgaccgctcacctccccttcctcctggagccttgaagtcggaggccctgagccatggacggtatctgaggatcggtttagcgtatctggccggagaaattggcaacatttgctacgaataaaacccaagcgtttccagc

SEQ ID NO: 2235 - DNA, 693 bp, Homo sapiens
  misc_feature 338, 372, 380, 384, 405, 424, 428, 449, 473, 475, 481, 491,507, 533, 536, 542, 546, 550, 557, 560, 566, 569, 570, 573,577, 578, 584, 588, 599, 602, 606, 608, 611, 612, 618, 620,626, 632, 634, 644, 645, 646, 655, 656, 661, 662, 663: n = A,T,C or G
  misc_feature 673, 675, 676: n = A,T,C or G
tttctcacaggacaacacctgtcatgtgtcaacaactgtgtgaagaatgacaaaaagacaataggacaagctcatttcctgagcttgtagccgcagaattgggccaggtgcttttaatcctcacagctgctctgcaagcctttgccctgcttactagactgaaaatcatgataaagctgagactttccctgactcacctttgaatcctctatgaatctgccgagctaagaagaccacctgacacttagtggatactaattcaacagtgtgctgacccagtatgcaaaggaccatgggcaatactctgtgtgtgtgtgtgtgtgtgtgtgtgtgtgtgngccctctcttgcacactttgcaaagcttgaaaanggaagtangcantgaccattttatatattgganaccagcgtatatgggaaantgangcattaagaagaaatataacntgctttaaactacacatcaactgnantggcanaactcggagntagatggatgagattntgcccccacaagacttacaaggtgtntgngaaggngttnctgnaagaaantancatttnaanncanctgnngggagnaaanaaaaacccctntgncatngnagnnggggcntnatccancccggngngggggcaaannnaacaaacanngggcnnngggaaaagcnanntttttttttaaagtttg

SEQ ID NO: 2236 - DNA, 181 bp, Homo sapiens
  misc_feature 29, 40, 44, 45, 51, 56, 64, 68, 78, 80: n = A,T,C or G
tggggagctcctgcattaagtcagaactngaggtggaggncccnncattcntccanaggatgcngcancaagacaccntnttggaagcagagcagccctcaccagacaccaaatcggccagcccattgatcttagacttcccagcctccagaactatgaaaaataaatttcttttgtttat

SEQ ID NO: 2237 - DNA, 689 bp, Homo sapiens
  misc_feature 30, 551, 588, 591, 615, 638, 648, 654, 660, 661, 663, 670: n = A,T,C or G
aaatatggaattcaaaaggtcattaagaanaaaagaaattctcaagttccttctgaatttctaataacacgggaaatgaggcttcagtgctcaacatgccaacatgcttggaaattcttcaataccatgacctctaaaagcccagctaatttagtgaaaagagaaacaagggtcctgcataccaatgaaactgctgacatcagctgatctgaatgacccaacaaaaagcttacatacacaaagaatgcagttttcacatcctaatcatttcattctccttaccctgaccaatcaatgatcccaatttgccagtcccataccctccacaattttcttaaaaaccccagatcagtatattccttggggagatggattttggtgttttctgccatctccttgcttggctgtcctgtgatctttaaacactttttctgctgcaaccctgctgtctcagtgtacggatatgttactgtgcagagggcatatgaagctgttggcctataatattatgatggcattagtggccttataagaattaagaagagaagccnggcacattcgcacgcacctgtagtcccagctactcangangctgaggcaggaggattgcttganccccaggagttaaaggctgcagngggctttgancatttntttgannanccactgnactcttacctgaacaacca

SEQ ID NO: 2238 - DNA, 401 bp, Homo sapiens
  misc_feature 30, 41, 43, 46, 49: n = A,T,C or G
ctggggagctcctgcattaagtccacctgnttgagtacaangntgnggncaacttttactgttcttaccattgaaaaagaagtgctgaggccaggcatggtggctcacacctgtaatcccagcactttgggatgccgaggcagctggatcacttgtggtcaagagttcaagaccagattgggcgacatggtgaaaccccgtctctactacaaatacgaaaattagccattgtggtggcacacgcctgtaatcccagctactcaggaggctgatgtgggagaactgaaccctggaggtggagattgcagtgagccaagatggcgctactgtgctccagcctgggcaacaaagcaacactatgttttaaataaataaataagtgctgagatctcagaaaatac

SEQ ID NO: 2239 - DNA, 446 bp, Homo sapiens
  misc_feature 386, 396, 397, 398, 399, 400, 401, 402, 403, 405, 406, 407,408, 409, 410, 411, 412, 413, 414, 415, 416, 417, 418, 419,420, 421, 422: n = A,T,C or G
gtgtcaggcctctgagcccaagctaagccatcatatcccctgtgatctgcacctacacatccagatggcctgaagtaagtgaagatccacaaaagaagtgaaaatagccttaactgatggcattccaccattgtgatttgtttctgcctcaccctaactgatcaatgtactttgaaatctcccacacccttaagaaggttctttgtaattctccccacccctgagaatgtactttgtgagatccaccctctgcccgcaaaacattgctcttaactccaccgcctatcccaaaacctataggagctaatgataatccaccaccctttgctgactcctttttcggactcagcccgcctgcacccgggtgaaataaacaaccttgctgntcacaccaannnnnnnnannnnnnnnnnnnnnnnnnggggggggggggggggggcctttt

SEQ ID NO: 2240 - DNA, 500 bp, Homo sapiens
  misc_feature 188, 341, 379, 382, 400, 410, 411, 412, 418, 422, 425, 428,429, 438, 449, 469, 472, 485: n = A,T,C or G
gtgatcatatgaatgaatttaatgtttaaaaatcacctgacaactacttgcagggggtaaagtggaaagtgggcaaggccaaggtcatgctacagaatgtgactgagcaacagggggatcacttcagctgggatgggaaaggaaagcctccaggaggagttgacatcgaatcacagttgaatcctaanaagtcagtcttgcaaagatctaggaaagaaacagctaagtttctaaggtgcccagatttcatattgctcaaacacacatgctctacaaacaatttatacagacaacggcaatcatcaccaggatcctggagacgagatacatcctcagcttangaaagaagacggggattaaagaagattaaaaggacccnggnctttcggaaaaacttttnaaaagtcctnnntttggnaggnaanagnnaaataaaanggtcccatggnaaatcttttcccaaatttanttntttcaaaagactngcaggtaaaagaaca

SEQ ID NO: 2241 - DNA, 495 bp, Homo sapiens
  misc_feature 368, 372, 384, 398, 412, 413, 427, 445, 448: n = A,T,C or G
gtgctgtggctcacacctgtaatcctagcacaccagccgaggcaggaggatcacttgaggtcaggagttcgagaccagcctggccaacatggtgaaaccccatctctaccaaaaatacaagaattggccgagcgtagtggcccacgcctgtaagtccaactactcaggaggctgaggcgggagaatagcttgaacctgggagacaaaggctacagtgagctgagattgtgccactgtactccagcatgggcgacagagtgagaccctgtcccaaaaaacaaaacaaaacaaaacaaaacaagacttatttcaatggacttgtcccctctgtgtcatcattcaatcatctctgtaagttaaaatcctgngggnggggacaacccnaaaagggggggaanggttttaatttttnnccttttgaaagtancaaaaaggggacacctgncantgggggaaggatttcaaaaaagttccccatgcccttcatgaagtttt

SEQ ID NO: 2242 - DNA, 469 bp, Homo sapiens
  misc_feature 386, 412, 413, 414, 417, 421, 431: n = A,T,C or G
gctcttccccagtctggagtacagtagggtgttcttggctcactgaaacctctacctcctgggtttaagcaattctcctgcctcagccacatggagtattgctctgtggcccaggctggagtacaatggcgcgatcttggttcacagtaacttccgcctcctgggttcaagtgattcccctgcctcagcttcccaattctggaggctggaagtccacgatcaaggtgccagcatggtcagtttcttgtcctggctcataggccgcccccatcttgccatcttcacaaagaagaggtgtactcacgtgacctctcctttgtgcacaagaggagagagtgagcaagtgaactcttggtgactcccctacaaggacactaaccctattnttggaggggcccccccctgggaactnnnttnaacntaaatacctnatttaaacctggctccaaaaacagcccattggactttg

SEQ ID NO: 2243 - DNA, 469 bp, Homo sapiens
  misc_feature 374, 408, 421, 422, 441, 443: n = A,T,C or G
aagcgcctaagaaatgcctgtgacgttcgtgaactatgtgattgtgaattccaaatttgatgccaactttatgtgtaaagaagctaactcctgccaacatcgtggctgaatgaacagctgggactatgcttaacccattcccagcttataaaagccccatggcagctgcagtgaagcatcagattatgtgatgcaacaaaattcaaatatgaaaaccatcttggaggccgggcgcggtggctcatgcctttaatcccagcactttgggaggccgaggcacggtgcctcacacctgtaatcccagcactttaggaggctgaggcgggcggatcacctgaggtcgagagttcgagaccagcctggccaacatgaanaaactccatttttttcttaaataccaaaaatttncccgccttggggnncatgccttgtattcccacntnctcggaaggctgaggcaggaaaattg

SEQ ID NO: 2244 - DNA, 79 bp, Homo sapiens
  misc_feature 14, 24, 54, 66: n = A,T,C or G
acagggaattttcnttgtgtacgnatcataggtgactatattacctgtccaaantgaataaaacanaatttaaaaagcg

SEQ ID NO: 2245 - DNA, 251 bp, Homo sapiens
  misc_feature 19, 30, 35, 43, 48, 84, 109, 139, 165, 194: n = A,T,C or G
tcccccaaccttggaaatngccaaccggcnccaancaattggntttancttgcaaccctccaaatttcctggggcttcaaaaanaccttttttttaaaccttccccaancaagctgggggaactacaaggcgggggccnccactttgaaacctcgggcttaatantgggaaggtaatttactaaagtatcttgnaaaaatccttaatccaatattaaggggaaaaataaaagggtttttttaaaatgggtt

SEQ ID NO: 2246 - DNA, 487 bp, Homo sapiens
  misc_feature 41, 44, 45, 47, 52, 80, 112, 132, 146, 147, 150, 152, 154,159, 166, 177, 205, 291, 322, 347, 357, 359, 371, 394, 397,406, 407, 413, 422, 461, 469, 470: n = A,T,C or G
gaggaaagaaggcggaagcacgaacggcttaattaggaagnccnncncttanttggacctccccactggaaacacccacnttgaacaactattcacacaaagaagcaccttngtaagaaccaaaaatcaggngccagacagaaagnnatntntntgctnaactganacaaatgcacnattcattgagccagactaaggcataagngactattcctctatgttccccaacatgtaaattgtggattcagggaaaggctgattgaagagtcattaagaatgtagcatttttgngttttatttcctggaaccacaccttatctanctggaactgtcccctccccgccccnccaattctgncntgttttgagagntcctgcctttctggaccaaattnatnggccttttnnacccanggggggggngggggaaaatttccctaaaagggggaaaagggagcggtnccctgccnncttgagcacatgttgcc

SEQ ID NO: 2247 - DNA, 148 bp, Homo sapiens
gtgaggacacagcaatcctccagaggatgcagcaacaagacaccatcttggaagcagagcagccctcaccagacaccaaatcggccagcccattgatcttagacttcccagcctccagaactatgaaaaataaatttcttttgtttat

SEQ ID NO: 2248 - DNA, 455 bp, Homo sapiens
  misc_feature 404, 414, 417, 424, 429, 437, 440: n = A,T,C or G
cttccagaggctgcctgcatcacttgccttggggccccttcctccatcttcaacaggaggttgagttcctcatcacataacatcactcggaccttgtcttctgcctcgctcttccacttctaaaagccccagtgattacactggactcatccaaataacccaggatcatcatctcctctccaggatcttgttctgcggcccaggctggagtgcagtggcttgtggaaaactgaactcatctttataattccttttttattgagacttacctagaataattaacatttgaatttaattaaaaacagttcttttgtcaaacttaacccaattctccaatacttttgtaggtcaccttctttaataacaatcagaggaagaattttctgactctttaaaaaaaaganctaaaaaaanaanctttatngccancacataangcnttttttttcgggccc

SEQ ID NO: 2249 - DNA, 433 bp, Homo sapiens
  misc_feature 391, 396, 406, 416: n = A,T,C or G
atgttgcttgtattagtccattttcacactgctgatgaaggcatacccgagactgggaagaaaaggaggtttaatggacttacagttccacgtggctggggaggcctcacaatcatatcagaaggtcacagctgatgcaagaggcaggctcccacagccttgagcagctctgcccctgtggctttgcagggtatagctccattcctgactgctttcgtgggctggtgttgcatgtctgtggcttttccaggcacacagtgcaagttgttggaagatctaccattctagcgtctggaggatggtggccctcttctcacagctccaaattatatgctggatatacaagagactcatgacccaaactgggacaacaggaatggctttctggganaaaanaaatttgggnccccaacccngaaaaaaaaaaacccgg

SEQ ID NO: 2250 - DNA, 74 bp, Homo sapiens
  misc_feature 20: n = A,T,C or G
atacctcaaaagggagttgntttaatgtctaacaacacagaaggaaataaaagtgcctgtgattaaagtgcttt

SEQ ID NO: 2251 - DNA, 390 bp, Homo sapiens
atgcatttgtcattgaagaaaaacatcttacaaaggaagtttaaaagagaacccagatgaatatttcttcagatgaaccacaaataagttctgatttcaacatgttctacaactccccagagctgagaagctaaagacggttctacaatatcatattccaaaggcatcacagggtttagctgctaatgcaataaagtggtttttgtcttggaagcacgcaacatcatgaataacattgtcatctggaaacaatgagccaataggcaccattttgtgttgtaaccgagcaggcttgcttgattgtggatgcagatatgcccaccctacgtaagttgacattttgtacagactagaagaaatgtgtggtatgagatcaataaagaagtaact

SEQ ID NO: 2252 - DNA, 149 bp, Homo sapiens
gtgaggacacaagcaatcctccagaggatgcagcaacaagacaccatcttggaagcagagcagccctcaccagacaccaaatcggccagcccattgatcttagacttcccagcctccagaactatgaaaaataaatttctttcgtttat

SEQ ID NO: 2253 - DNA, 447 bp, Homo sapiens
  misc_feature 370, 379, 388, 402, 411, 423, 426, 433: n = A,T,C or G
aaccgaggaactgacacaatgtccataataagaaaaagaaggaaaagtaagaatttcaaataatccacaaactgaaaaaatgagattgaatgaattcctctttcaaaggcaaagaaaagttaaacagtggcttctacaagaaaggtgaactccttataaatgaaaaaatgacctttgctgcatttgaggtgttgtctgtcaacattatccgtcccttttgagggtagtgtcatctgataacatttttgagtcatgggaaatttccggaaacagaacagcacacagaaaggactgacctatttctcttagagtaacatcctcgtggctcatccacgagaaaggaccttgaaaccttgaagtattctgtggnatcctgtgngtacacagntctttttttaaaanaactttaanacctttaccttnggnggcttgnctttaaagggaaaa

SEQ ID NO: 2254 - DNA, 472 bp, Homo sapiens
  misc_feature 409, 413, 419, 426, 429, 430, 435, 437, 438, 448: n = A,T,C or G
atacttcctcttatctcttatcttcccacctgagccaccagttcatagagggtatgaatgtctgactgcctccaggcatacagccagaactcactgtgtctggacgggcctcatactacagcctccaccccttccaacctcctctgcgacagactgtggctatgttcttcctgctgaacaccacctctgccctgatggctcctgcaacttggacaaagtgacaaggtgaagttcaggaggctctgtgttgctgaagaattggccttgaggttatttcatgcctgaatgaccagtggtttactaccagaatcatctggcttcctgcaaggaagatttggggcttggtatctgttcccctctcagactcagcagacacctaaccaccgctgaaagtcactgaaatcggatntttnccttcncaaaaanggnntcttnanntttggattcnccaaagggacagaggaaaaggggg

SEQ ID NO: 2255 - DNA, 423 bp, Homo sapiens
  misc_feature 385, 397, 403, 407: n = A,T,C or G
ggatacaccaggcagaatggagaaactgagacatcctggcaaatttgatgaggtccccaaggtctctaatttggaatacgtcctctagcaacgacctgaggcttaacatctgctgattctgtgctactgtaagatagttcttagtttactgggtctgaaaagcaggtttctcttttaacctctgggatttcttaacagttgctaccggtggtatgatcacctgatgatgtacttttagccaactgtgtgtcatcaataggggtttgtctgttttaaagaacattcaaagaaaaggaatggctagtcatacataggagatcttgttagctgggatttaagggagacttagagaaaagctaacgggaaaaggacgtgcattgtggangaaaggggggcngctgtnaccnttttaaaaaccctttt

SEQ ID NO: 2256 - DNA, 465 bp, Homo sapiens
  misc_feature 61, 65, 67, 75, 89, 97, 106, 108, 120, 127, 133, 137, 146,151, 162, 181, 185, 205, 218, 226, 230, 240, 242, 249, 265,296, 312, 326, 343, 381, 391, 426, 442: n = A,T,C or G
ctgaacctgactgatagaagagctaaactgatgaagccttcagatactttttttttttaanactntnactccgtngcctacactggagngcaggggngatcatagntnactgcagcctcnaactccngagctnaagngatcctctngcttnaccttcctgantagctgggactacaggctngggncaccatacctactatttttnattttttatgganacaggctntcantatgttgacnanactggtnttgaacttctggtatnaagcaatcctcccaccttggcctcccaaagngctgggattacaggcntgacccacctcgtntaggcaaaaaacagctnaatggttccagtctttcagtcctgctcctggccaacantggacctttnaaaggttaaccaagttctttttcagggccgttggnaaaaaaaccccttatngttggaaaccaaaaaagggggtt

SEQ ID NO: 2257 - DNA, 427 bp, Homo sapiens
  misc_feature 384, 402, 407, 410: n = A,T,C or G
gtaggcagtttggaaacctgccccagctgctgcagtcatatcagacttgttctctggcttatagccatgaagacacaaccacagccttcatggtattctccactcctgatcttccagcttaatatctggactaacaagaaacttaggactctgaccagatgtaaaattaacatgttttggaagcggcagagtaatgcccaaccaacttttccccaacatggggcataaacattgtaacatccagtccaaatgtcaatccagttttctcagagataactgctctaatataagaatgtgtgcttgtacagagtttgtgatgtgaatatgtaaattttatttatgccataatctcactacagtacatcaaacagagatgcagaatgntacaaattcttcaactanacagnttngggcaggtttcacaaac

SEQ ID NO: 2258 - DNA, 435 bp, Homo sapiens
  misc_feature 401, 419: n = A,T,C or G
agtctcactctattatccaggctgcagtggtgtgatctcagctcactgcaaactctgtctccgggttcaggctattctcatgcctcagcctcctgagtagctgggactacagttcacagccgcggtggcctccagcctgaggattctcctgatacatgctactaagggctcacctgtgcttgccttctccctgggagctgtcgactcacagttaactctgtaggttgaatacatgccatctgctctactccctgttcaaagccactcagccataaaggaataaaataggaagaagcgaatggcaatggagatgcaaaaagtgtcaacaatattttggaagacataagttgtttggacaaaagacttcgaatttaacgtcagctttctccattctgctgagnggctattcctggagaaanccattaaagaataatt

SEQ ID NO: 2259 - DNA, 202 bp, Homo sapiens
  misc_feature 1, 5, 6, 8, 9, 10, 12, 19: n = A,T,C or G
ncaanngnnntngtggaancgacacatgcattactgtaacccacgaccacaggatgatatagatcattccttccatcccagaagacccttcatgcaccttcccagtcaacactccctacttcaagacagccactgttctggtttctttcatcaaagataagttttcccagttgtagaccttcaaataaatgaaatcatacag

SEQ ID NO: 2260 - DNA, 292 bp, Homo sapiens
agatggatctcgaactcctgggctcaagcgatcctttcaccttggcctctcaagtagctgggaccacatttgctcaccagctggcccaagaccagactgggcaacatgggtcatcctcctctaagattccaggaccatgatcatccctctattgctacttcttagatcagcttgtaatgtccatctcccccaccagactgcgtctccagcatctctgagtccccagggcctggcctggggcttgctacatggtgggtgctcagtaactgtgaggtaaataaatgaatgaatt

SEQ ID NO: 2261 - DNA, 121 bp, Homo sapiens
atggagaaactgagcctcagagtggttaacaacttgcccaaggtcatacagctgggaaggagtgtacctgaaattaaaatcaaattgtctgattccttcaaaaaaaaaaaaaaaaaaaggg

SEQ ID NO: 2262 - DNA, 528 bp, Homo sapiens
  misc_feature 9, 26, 27, 57, 73, 80, 138, 141, 164, 165, 184, 455, 457,477, 508, 511: n = A,T,C or G
acctaactnaaaataaatgtgaagannaaacacgaagctctatgacacacttgatcnaatatgacaaacaccnaaaattnctactcagtgcacttacattgcgcttacatattctggccttactactgtgggcggcgngcntcaggtcgaaaccttctggcttnnttgcgggactccttctggntgggcaattgcagacacttgttgagcaaatcatcaaggggagcaagcaagtgtacaggtacacctaacgcacgcatgcccaccttgcgtgcctcgtgtgtacgcgtgcgtgctcgcttcatgtgcgaagcatcgtggcggggctcgcctccaagcttcagcgaagcctccgtgccgtgccgccgtgcgttgctcatgtgccgtgcgttgtgcgggcttcacttttcgggcttcaacgcagttttgaaagaagcagaagccttggaaccaanangaatctcaaagtatgtggtngcttgcaaaaccctttcttcgcttggcctgnaanaaaatccaagggactct

SEQ ID NO: 2263 - DNA, 309 bp, Homo sapiens
gtatgagagccagatcctgcagcccgtagcttaggaagagcagtctctacggaggagcaggaaccaggactcccatagtctctctctggcctctgtgctgtctggcaaacagccgtgtcgccttggcctcgaaccctggagcctgcctcaccaggagacagaatcaaggacaggggcctcgccttggcaccaggtggcccttcgtgtgcgtacataaacacttttcccaggatatgaataaggtccacaggcactcgggaggaatgggtgtgttgcgatttacggtcaaggagaccaggatgtcattgc

SEQ ID NO: 2264 - DNA, 384 bp, Homo sapiens
agaagaaaaaggcctcccacagagaatggccaagccaggtcactgctatttcccaacagaaatgaaaactggaattgagccatgtggaaagatggaccaggccacaagaaggtcttcgggacaaccctgaaagaggtgacccagggagacagagtccagggtcctttcaaatcactgctggcaggagcaaagatcaagataggtgaaacctgatattcaaatgcaggcgtggaaaaagaataggcacagtggttcatacatgtaatctcagagctttgggaggccgaggcaggaggatcgtttgaggccaagatttcaaggctacagtgagctatgattgcaccactgcactccagcctgggtgacagagcaagactcggtctc

SEQ ID NO: 2265 - DNA, 368 bp, Homo sapiens
  misc_feature 333: n = A,T,C or G
gagaggcaacgtttcaccatgttgaccaggctgcacggggtccatttttgtgctcaccgttattcctacagcctcacagaatcctggacacaaagaaagacttaacagggttcattcattcctgaaccaaagcggctgaacgatgtcaacaggaccagagaggctacaggaacgccatattttcttctacatctctttttttaaaaatcttatttcaatggagtcaaactcaataaggtgaattaaaggaaaaagagctgacccaaacaaacaagcaaacagaaaccttttctgtcctgtaatgtttaggcgcaagataagaagtgcaaatanagaagtttaaaaagctaattaaaggggtttgtttg

SEQ ID NO: 2266 - DNA, 439 bp, Homo sapiens
atgcagcaagaaggtgtcgtctatgaggaatgggcccttaagaaacctagaacctgatggcacgtttatcttcgacttcccggtcgtcagaactgtcatgcatgctgttactgatctgctatctcatcttgtcggttggcatatggcagcagagccaggcctgcagctcctccagatcctgatggatctccttcagcatctcagaagcctagattaggtacatgtaccagctgtgcagctctacctacatggtaggtaagcctttccataaaagtgaagaaagccccgtatgaattttttcaatgaatcaagactctgtataaaatcagttggctaaaaggagagcacatctgctcacttctgctgtttatgcaacatgctacagaatgaatttaaaagccaaactttttattaaaatgacaaaattgagacaaggaac

SEQ ID NO: 2267 - DNA, 211 bp, Homo sapiens
ggtctcattttgttgcccatgctggagtgcagcgatatgatcaccactcactgcagccttgacttcctgggctcaagtagatcctcccacctcagcctcccacatagctggaactacagagtttactccattgctgactcctcattgaacactttgctgcaccaacccaaccaactcagagggttagagaattgtttgagacccctcctac

SEQ ID NO: 2268 - DNA, 477 bp, Homo sapiens
  misc_feature 406: n = A,T,C or G
gctccatcgcattacaggagacgtcagaaactgtaacgcgcatggtcttctcccgtcctggaattttcatcggtgatcatgactgccacccctaccgcgcaatttcacaagtgggctcttataatcccacaacagccctctgacagaggcactgttatcaccccgctttaaaggagaggaagcggcggggcaccgtggctcacacctgtaatcgcagcacttcgggaggccaaggtgggcggatcacgaggtcaggagactgagaccatcctggctaacacagtgaaaccccgtctctactaaaaatacaaaaaaaagtttaggcaggcgtgatgggacaccccctgtagtcccaactactcgggaaactgaggcaagagaattgctggaacccgaaaggggcaanggttgcagtgagccgaaaatcacgtcatgctctctagccctggtgacagaacaagacttttgtctcaaaaa

SEQ ID NO: 2269 - DNA, 567 bp, Homo sapiens
  misc_feature 21, 22, 23, 28, 30, 42, 47, 55, 65, 78, 100, 123, 129, 136,231, 290, 331, 359, 361, 363, 394, 401, 402, 407, 437, 443,459, 478, 483, 485, 491, 503, 509, 515: n = A,T,C or G
atctacctacgttaagtcagnnnactananggccaacagaanacttngaaaaaanggaagggaanaaagaaaaagaangcaccaactctgcaaagttctntggaatctgggaagtcaagcganggcttntgccttnttcatggtgacccttttgagcaagttcagcctggttaagtccaagctgaattggcctcgctggcctatattgaattctatatggggcccgctatngggccaaattcttttggctttttaccctggggaaagaaaatactcattaaagccacctnttgttatttacccccaaatcttcacaaaggaaaaaaaaacnaactcccagcaaaagcccttttttggcntngnacctggctccttttgaaaaccagtggtgccntgcccanngaatncctttgcccccttgtgcccccgcccttacnacttcnatcccccaccttaccntttggtcccacttcttggnccggncnacaagntttcaagtccanggtccntccatncctttttctttccactttcatttaacccacctaaaagaaaaagcccttcctt

SEQ ID NO: 2270 - DNA, 294 bp, Homo sapiens
  misc_feature 19, 22, 30, 42, 51, 69, 86, 88, 102, 164, 181, 247, 250,252, 254, 277, 279: n = A,T,C or G
ccgctcatattcagggcangangtaacagngcggaatttaanacgcaaagnaagattttgttggagaanaaatgagatttctttgncnaggaaccagcccgnccttttgagcaagttcaagcctggttaagtccaagctgaattggcctccgctggcctatatngaattctatatgggccngctattgggccaaattcttttggctttttaaccctgggaaaggaaaataacttcaataaaggcccnccntntngtttttaaccccccattcttttnanaaagaaaaaaaacgg

SEQ ID NO: 2271 - DNA, 217 bp, Homo sapiens
ggaccacacttcacaaaagggagcaagaaggcagataacggcaaagaaaaatgtttgtagtttactgtggaggaccaagtgagtttatacagatgtttacctcctttgggattatttgctgctggctagaatgaaaagacaaacattcccttcaaacagtatgccattgcctaataattttgcaagctcaaatgaaatccaaccaaattcagaattt

SEQ ID NO: 2272 - DNA, 191 bp, Homo sapiens
  misc_feature 20, 30: n = A,T,C or G
gcatcagcaaactttggcancagaaagcanaggactccaggcactgctcatccctacaggctgctgggtgaacaccctcgccaaagaaggagactgcagaaatcctccttgatggtatcagctcactctctcttaaatgttcatccacttttaattatttacaactaataaaacatgtaataacacggtcc

SEQ ID NO: 2273 - DNA, 284 bp, Homo sapiens
agtaaataatttcaagtactgaactaattgctggctcataaggcggagtgctactgcatttctgaacagcaggctcaactgtctaaaacaccttttctaaagcatgaaggaggctgatggccatgtcaacgttttcctcaagatcaaggaatcaatcctttacgttgtgtaatgaaaggattcattctgttgatttcccccatacaaattatgtgttccacagatgaatttctgcttcaacctctcgggaggcttaataaaaggccttgaggctttgaaatgac

SEQ ID NO: 2274 - DNA, 102 bp, Homo sapiens
  misc_feature 19, 22, 54, 59, 69, 70: n = A,T,C or G
ggacaaagcttgggccgcnagntctccctttgggcaccccccaccctccttggnacaangcctgatgtnnagtcttgggtgcgactcataccggcctgggaa

SEQ ID NO: 2275 - DNA, 369 bp, Homo sapiens
gagtcaccaggttcacggaacaagctccaacaagcaccctgtgctcagccacatggcacctctcctgggttctgcccattctgcgcggcctctgctctgctcaaatggctacttaccttgaagagcttcccctctaggctctacctgaacctcactctcttcgggaatcagaagataaatcatttccacacaatatccgaaaaggatgtcactctttctactatgtattgtggattctaagacacacacggtttttcacacttggacatctctgaagctggggatgtatcttataatccaagttgctcagttataattagcattttttctttctcagtggtatataaaacaatgatacaacttcaaaag

SEQ ID NO: 2276 - DNA, 174 bp, Homo sapiens
ggacatctgaatcaagctatgtaaaggcaaaacctacctcatgctcagagactcagcatcctcactgaatgcgtcatcacgcctgatgaagcacaagagaaaacaagagaaactgaagatcatctatatttagtgctagaaaagaatcacaaataaatattaaaatacacactc

SEQ ID NO: 2277 - DNA, 359 bp, Homo sapiens
  misc_feature 31, 35, 39, 43, 54, 56, 59, 60, 68, 76, 78, 88, 99, 100,127, 171, 239, 299, 315, 336: n = A,T,C or G
gtcatgtgacccaagaccatcccataagccntgantttngganttttggtggancngcnnggaaaaanaaactttncnttcattgganttggaatggannagggcggtcagtttgaatttgcagggncttgccttgcggcccatgggaaagggcttgccgaggactggaanctaccaaggagggaggcagaggacaccggatgtgggtgaaaatacgggccctaacacatcattttganccttggattcacccctgcctggccttgaaaccaatacattaggccccaaatatattattnggaatatatatatttnggaatatggtgtatttagaanccaatttattagaaacccaattt

SEQ ID NO: 2278 - DNA, 194 bp, Homo sapiens
  misc_feature 48, 105, 117, 127, 163, 168, 169: n = A,T,C or G
tgggatcaaagaaagcaccagtttctgaagacatttaatacctgaggnctcaagactagcacaaacttcatttttaaaacaatctacgttgccttgttttatgtntaagatccaaangtgctagacnagttctttattgtcaatctaccatgtgtgcgaccancaacnnttaaggatgacttttgttaaatatc

SEQ ID NO: 2279 - DNA, 390 bp, Homo sapiens
  misc_feature 32, 68, 76, 87: n = A,T,C or G
gtggcaaccctgcataaatcaaatctatcaancaccatttttccaacaacatatgctcacttttcatntgggtcangcattttttancaatattttaaaattaagatactgccatcttttgcaaattgaaggtttgcggaaaccctgcatggaggaagtgtatcggcgccatttttccaacagcatgcgctcactttgtgtcttttttcacattcccctaaagagggaaacagcacaggactgggcagtgcaatgcttccatagtgcacctcattgcatggaccgttcccctgaggctggtgggcaagccagcgccaagcaacccactctgtgatcaacccactccccatgggaagtcttgcccttggtggcaagtgtttccatagtaaa

SEQ ID NO: 2280 - DNA, 399 bp, Homo sapiens
  misc_feature 3, 6, 8, 10, 11, 24, 26, 27, 30, 41, 44, 49, 55, 56, 64, 90: n = A,T,C or G
ctnacntntnnagtccaactgagnannaangcattggtctnganggagngaaggnnattccctnagaggccacaaaccagggaacgccangggcggctgaagctaccagaagagccaggagaggaaccagggatgggttctttgccttacagccctcagaggcgccaaccccgctgacacctggatctccattcctagcctccagaactgtgcaagagtaccgtttctgcctctttctgtaggaaaccacccagggtgtggtgatttgtatggcagcccccgacactctggcaagctccatcccagcgtcccctcctcccatcagctgtgacctcatgttcctctcctggactctgttggactcatggcaagaatatcttaataaacgcatgttaaagc

SEQ ID NO: 2281 - DNA, 117 bp, Homo sapiens
  misc_feature 22, 24, 27, 28, 29, 30: n = A,T,C or G
gactctgggagctcctgcttananctnnnntgttagaattggaagctaaagctaccaaagacgtagaaagaaatcttagcagggatttagtgcaagaagaagaacagttgatggaag

SEQ ID NO: 2282 - DNA, 262 bp, Homo sapiens
gaagcccctctggatgcagtccaccagagaggagcagtccattatcaaagaagattatgtgggctggagacccaatgcaggagggaagcagcaggagtttctgggaggatggcagagggagatgacgggataactgcactccaggtggcaaaagcaacccatcctgacaggacagtgtgacccaagagccatgcacagtaaggggtatcatcgccatgccctctgcctcatgcaatcttaaataaatatgaatatattcaac

SEQ ID NO: 2283 - DNA, 513 bp, Homo sapiens
  misc_feature 2, 3, 14, 17, 18, 20, 23, 25, 26, 27, 44, 48, 50, 59, 67,70, 71, 75, 77, 80, 84, 103, 105, 107, 119, 120, 121, 126,133, 137, 139, 142, 149, 150, 157, 161, 428, 460, 492: n = A,T,C or G
gnnggaaagctagncgnncntgnannncgagtgctggaggaagnctgnanacatctacnccacacanaannaagncnatnattnacagggcattttactaatnanangccatgctgggnnngcagnggtgcantttngnctnactgaannctctgantggnggggtcaacgatccctcccacctcagcctcccgagtagctgggactacagaaattattcctttgcaggtggtgcaaaggatcagcacgggagttttgacctgctccgtttccgacctgggtcggttcacccctccttaggcaaccctgcggttccccgctccagggaggtcaccctcttgatgctgaatttagcacggacacctgatgggcacagtgcactgcagcccagagctcctgagctcaagccatcctcctgcctcaacctncaagtagccaggaccacaggccccccccttgnggggaagaaataccaggtgcgcatgcttcaanaaaaagccgctgaggacccgg

SEQ ID NO: 2284 - DNA, 284 bp, Homo sapiens
gaagccaactctcagggtcttcctccgcttctgttctctcatgccccttggtggaggctcccagatggacgctcagacacggaaggtccagggagatgcgtggatctgccgccatgtgggtggaccaagctgttgcctccattggaagcctctgtccggtgccacatcctccctgggttccagtccccacctgccaggttgacaattaggcaatttgatttactaaggagaagacaaagaaagaaaaggagaaatatttcaagaaaaaaaagactgtgaaaaag

SEQ ID NO: 2285 - DNA, 400 bp, Homo sapiens
  misc_feature 21, 22, 24, 27, 36, 37, 43, 49, 60, 68, 73, 74, 85, 338,341, 343, 346, 348, 349, 351, 354, 357, 360, 361, 365, 367,370, 372, 375, 382: n = A,T,C or G
ctggggagctcctgcattaanncnganttgttgganntgtgtnacaganaaagactcggngaatgccncacanngatgaaggcangtgatgcatctacaaggccaagaaatgtcaaagactgcctgcaaaccaccagaagctaagagcaaaagcacaaaagcgattctctcccacagccctcagaaggaaccaaccctacagacatcttgatctcaggtgtggagcctccagaactgtaagacaacaaatatctgctgttctaagctacttagcttgtgataatttgtcaaggcaaccctaggaaataaatacagggaacttcaaaaaaaaaaaggcnggngnggncnntnaanttnggnnttancnagncngantttgttnaaaagggggggggggggg

SEQ ID NO: 2286 - DNA, 432 bp, Homo sapiens
  misc_feature 29, 38: n = A,T,C or G
gactctggggagctcgattctcctgcctnaccctcccnagtagccaggactacagtgtcgaggtcatgaaagccactgaaagactgagaactgttccagaaaggagactagagagacatggcagccaaatgctccacataatcctgtcctggattcttctcctacaaaggaaggggtctgaggattaggtggtagtactgaatcaaggaactatcatctcctattgtgctgtaggatcttggcagccagaccccagctcccactttccctgaaagctccctttaatgaagctgaacgctgtcccagcaattccctccacagaagacctactgtcaccacctctggaggggcaattcctggaggaaccaagtcagccaatcgaaggtcctgaataagcaaaaactaagtaaataaattaccatctcgaaagtg

SEQ ID NO: 2287 - DNA, 520 bp, Homo sapiens
  misc_feature 357, 440, 449, 455, 506: n = A,T,C or G
gtgactagaagcatcaggggacctgccctagacacacccagagggcagaggggaactagttccaaggagcaggttcaagcacatggtggggaaaagaatgaagctgttttctccttgtgccctccaaggttctcctcttacaatatactacttacctcgtttctcctggaattctcaatatcctgctagcccagcaggttgaaagatgtcatcagcacggtgactggctgagatcaaatcccatttttgcacttaatggtttgtaggaaagtagacagaatgctatcctccacgtaccttgattcacttatctgtacgatgtggataatcgtaggatctacctcatggagctattgngaagattaaccagccacaaagatcttaaatcagggtctagctcatggtaagtgctcaatcaatgatagcaatttatcatcatncctcttcantggaanaccctgatgttcatcaaaaaatttaatgctcattaacctctaaagaaaaanggaaaggagaaaga

SEQ ID NO: 2288 - DNA, 350 bp, Homo sapiens
gtcctgctttctcatctacaactgaaggttgcatctttccttaaaagccattaacggtcatctactgtccatggggcggaggtggagctgattcatacagaatttgagaatcttgccttgcttaccatctaaagatgactcaaaagcttcttacatccaaatgaaacgtctcacttcgttcgtaaagaatgtggcatctttagggttgccttcacagtgacactatgaaaacctggatgacagcaacggcggtggcagcaaagtaaagcagcaaagtaaaaaaaaatcctgttttgtaatctccctttgtcaaatcacccacctaactggaaaataaattcttaaacatc

SEQ ID NO: 2289 - DNA, 409 bp, Homo sapiens
gctatacaaaactggtggtgggccagagtttgatttctgtctcctggtgttgatgaaagaggctttgagaaaaagatgcaggaaaactcaagacaggatgccatgctgcttttggacattaccaaaaacagcagaagagggagccccgcaaaggggcactggtatgacctttatgatggagaagaaagtgattaccccctttctgcctctgcagccacaaaacagatcaaaacctatttcagaacaagctaacagactctaagaaaattatgtaagacatgaaagtatgtgaattgttacagcaatcagaaaagaattaaaaaatttaaaaatgcattttaggagcaaagactaaacaacaaataaacacaacatgtaatgccctaagaaaaacagaggggtgaaaatg

SEQ ID NO: 2290 - DNA, 276 bp, Homo sapiens
  misc_feature 4, 27, 43, 45, 55, 72, 75, 83, 88, 90, 94, 129, 182, 184,238, 251: n = A,T,C or G
cagnacctgagtggctaagctcctacntcctgttctggaaggncnttcctgaccncacacatgagccatatnctnttcatacngacantntatnggtgagggaaaggcaacatttggaaggactggacnttttaccttaaggggattttaaaaaatcaccacaatggactattatcacaacntnggattcaaaatttatggatttcccttccttttggttacccaaaaggtggacttnggaagaaaaagangaagttgggagcttaaaataaaccg

SEQ ID NO: 2291 - DNA, 510 bp, Homo sapiens
  misc_feature 19, 401, 428, 446, 467, 470: n = A,T,C or G
atggagtcttcctctgtcntccaggctggattgcaagtggcaggatctcggcttactacaacctccgcctcccgagttcgagtgattctcctgcctcagtctctggagtagctgggaatacaggcacccaccttcgtgcccagctaattttttgtttgtatttttgtagagaccgggtttcaccatgttggccactctggtcttgaactcctgacctcaggtgatccgcccacctctgcctcccaaagtgctgggatgacaggcttcagccaccgtgcccagccaagatcaagttgttgttggcagggctgcactccctgcaaaggctgtaggagacaacccatctttgcttcttcagcttctaggggcttccgcagcatgccttggcgtgccttgcttgnggctgcattactccaatctctgcctgnatggcaaaataccttctnctgggccatctatcttcctgnggncacttataaggacaggtatcattggaattaatggccctcc

SEQ ID NO: 2292 - DNA, 255 bp, Homo sapiens
  misc_feature 124, 132, 137, 142, 149, 150, 154, 157, 159, 161, 163, 166,170, 172, 174: n = A,T,C or G
atggcagctctcaagatctgtccggaaaagtctagaagcctccagatttctaatcaacagactagcgctcctcctctgtaactgaggaacaagatgccaaggagacaggagaaagaagagaatncctttctngtttnggccntaacccnngaancanantngnccntgancntngtaaataagttacatttctgcagaggtgcttgacgttcacaccgtttggattgctttattaaaagactctttttagagccc

SEQ ID NO: 2293 - DNA, 450 bp, Homo sapiens
  misc_feature 355, 363, 377, 378, 380, 381, 382, 386, 387, 391, 394, 395,397, 419, 423, 426, 430: n = A,T,C or G
ttgaatacaaggatgtggtcaactatactgttcttaccgttgaaaaagaagtgctgaggccaggcatggtggctcacacctgtaatcccagcactttgggatgccgaggcagctggatcacttgtggtcaagagttcaagaccagattgggcgacatgatgaaaccccgtctctactacaaatacgaaaattagccattgtggtggcacacgcctgtaatcccagctactcaggaggctgatgtgggagaactgaaccctggaggtggagattgcagtgagccaagatggcgctactgtgctccaacctgggcaacaaaacaacactatgttttaaataaataaataagtgctgngatcttcngaaaaataaaaggnnannnaagnngggnccnngnggccaattaaccttgggaattnaccnggntgangtttttttaaaggggggggg

SEQ ID NO: 2294 - DNA, 206 bp, Homo sapiens
ggtcttactccagttgcccaggctggagtacactggtgtgatctcagcccactacagccttgacctcccggactaaggtgtttctcccacctagcttgatgactttatttgtgtacttttctgtattccaaatcctttgtaatgactattgtaaaggattacattatggagctcaattatttaggaaataaatccctcagacactt

SEQ ID NO: 2295 - DNA, 571 bp, Homo sapiens
  misc_feature 39, 40, 58, 66, 69, 73, 101, 106, 130, 131, 142, 183, 195,212, 235, 254, 311, 362, 470, 480, 508, 527, 531: n = A,T,C or G
gacgtctggggagctcctgcattaagtcagaacttgaannggagcttaatggtggccnccaagctngangtgncaccgggaggatcttaacttactggaanctttngcttccgggttcaagcgaatcttnnacctcaacctnccgagtagctgggattacagacgcccccccttatgctcggntaattttccganttttggaaaaaaggggnttcaccattttggccaggctggncttgaactcctgacctcangtgattcgcctgccttggcctcttaaaagtgctgggaatacaggcgtgagccaccgngcccaacccaaacgtttattttctaatttacaggtcagggggaaagaaagntttattttggtttgctttttcccttgaggaactgaatggtttctcctttctgaatttaaaggaaaataacttactgggggtctcttttttgccctcaaaatttgctancccagtaagncccttgcagctctgttattctttataancaacaatgcccgctttttncccnccctgaattttcttggggtctactgggcttaaccctcatg

SEQ ID NO: 2296 - DNA, 204 bp, Homo sapiens
gctacagggaggcactggaagaatttaaagtgggagaatgatatccatttttcactccaagttgaaaaggcacaaaactggaggtaaagaagtctacataggaggtcaaggactccttttctggattatcctaattaactattaagggagaagaattagagacctagatcataacagataattcattaaactagaacttggaag

SEQ ID NO: 2297 - DNA, 528 bp, Homo sapiens
  misc_feature 512: n = A,T,C or G
gtaactcccttcccaacccatgggagacaaagtggctggcctgcagaaggcatccaggagggtgacgaaaatgaatccaactaaaaatacttgcttcctgagtcttccttacaattaggagtagccttgtaaccttgtttagccgacaagaggaatgtcgagatttgcagggagttttgctccgttgcccagactggagtacagtggcacgatctcagctcactgcaacctccaactcccagattcaagagattcctgtgtctcagcctccgaagaagctgggattacaggcatgcaacaccaagcctggctaacttttgtatttttagtagagacagagtttcaccatgttgcccaggctggtctcgaactcctaggggcctcaagtggtccacctgccttggccttccgaagtggctggggttacaggcatgagccaccacgcccggccaagacaataacatttttaatcctacatcaaaactttacatttcaaaaaatgcattttctangctgagacatttttat

SEQ ID NO: 2298 - DNA, 468 bp, Homo sapiens
  misc_feature 266, 306, 320, 373, 374, 375, 376, 377, 378, 379, 380, 381,382, 383, 384, 385, 386, 387, 388, 389, 390, 391, 392, 393,394, 395, 396, 397, 398, 399, 400, 401, 402, 403, 417, 426,431, 447: n = A,T,C or G
ttgaatacaaggatgtggtcaactatactgttcttaccgttgaaaaagaagtgctgaggccaggcatggtggctcacacctgtaatcccagcactttgggatgccgaggcagctggatcacttgtggtcaagagttcaagaccagattgggcgacatgatgaaaccccgtctctactacaaatacgaaaattagccattgtggtggcacacgcctgtaatcccagctactcaggaggctgatgtgggagaactgaaccctggaggnggagattgcagtgagccaagatggcgctactgtgctccancctgggcaacaaancaacactatgttttaaataaataaataagtgctgagatctcagaaaattcccnnnnnnnnnnnnnnnnnnnnnnnnnnnnnnnggggggccgggggnccttttttnttttnatttaaaccgggttanttttttaaaaagggggggggg

SEQ ID NO: 2299 - DNA, 212 bp, Homo sapiens
  misc_feature 25, 40, 41, 48, 61, 100, 108, 134, 144: n = A,T,C or G
gcttatgtgggactgctcttcttcncagaacagtggctannatgacanttttattatgatncacttccacttaatgaacagcctgagccccttcaccttntgccatgngtggaagcagcctgaggaccttcccnaagggcagantctggtggcatgctccttgtccaatctgcagaactatgagccaaataaaccatttttctttataaatt

SEQ ID NO: 2300 - DNA, 323 bp, Homo sapiens
  misc_feature 35, 64, 83, 90, 92, 108, 127, 136, 137, 165, 168, 177, 199,207, 223, 232, 242, 252, 254, 259, 261, 262, 264, 270: n = A,T,C or G
attattttgcccttctgccttcttccatgggaaanactgcaatgaaagccctggccacatgcanccccttcatgttggacttnccagtcntnagaaccatgagccaantaaacttctattgcttatnaactactannatctcaggcatcttgttaccggagcacncantggtctttnacatttaataatgtgaaatgcnttggagtntgctttgtacatgatnagcactgantaaatattanagatccttangngggancnntncattgntacctctcttataataatttaaaagttataaaaccaaaaagccttcgaactgt

SEQ ID NO: 2301 - DNA, 477 bp, Homo sapiens
  misc_feature 406, 418: n = A,T,C or G
accgagtctcgttctgtcaccaggctggagtgcagtggcgcaatctcggctcattgcaacctccacctcccaggttcaagtgagtctcctgcctcagcctccccagtagctgggactacaggcgcacaccaacacacccagctaatttttgtatttttagtaaagacggggtttcaccatgttggccaggatggtctcgatctcttgacctcgtgacccacccaccttggcctcccaaagtgcagggattataggtgtgagccgctgtgcccagccgccgctgaatgtatttcttaccaccaatctgttcagtcattactattccttccccctttcctaagtaccatgggaaatgaagcataaagcactcaaagtccaaggaaaaggcaacattcaggatcagttncagaatgtctgnctctttcagacccatgctcccaccagttgggcatgcattcttcaacttggatgcctatg

SEQ ID NO: 2302 - DNA, 324 bp, Homo sapiens
tttttttctagtgttcaaaggccggcggatcatgaggtcaggagttcgagaccagcctgaccaacatggtgaaaccccgtcttcactaaaaatacaaaaattagcctggcatggtggcgcgcacctgtaatcccatctactcaggcggctgaggcagaagaatcgcttgaacccgggaggcggaggttgcagcgagccaagatcacaccactgcactccagcctgggcgacagagcaagactccgtctcaaaaaagaaaaaaaaagaattttttttaaaacttcaataaaaacttaggtcccattaaatggtaaatctggctcc

SEQ ID NO: 2303 - DNA, 288 bp, Homo sapiens
ctatgtcctgcttctccacttacaaggtcatatgcaactcgaatctctgtctacccacctggcatccacccttccagaccctgcttaaatgctacctcctcaaatgccaacgaactccaaaactcggttgttcattctggtggaagctgatctctccctccttggcagcctgtgtccccgtgatgcgttttgtaaacttgcagctactttgatcttgtcttggattgtacttgggtcttaccttaacccttggtccagatggcaaatacggacagcccctgtgagctc

SEQ ID NO: 2304 - DNA, 277 bp, Homo sapiens
  misc_feature 261, 263, 264: n = A,T,C or G
gactgccccagtctacacaaatcccttccttctagcagactgagtcacacaagaataaggagagtgaagtctacatgttggggactagagtgaatcgaagcttttctggaaggagctccgtgaacctggctttgagaatctataaaaaacaagccaagtaaaatgtccaagaggtagtggtgctgaagaatccaagaacttttcgaaatacttaacaaaactatcacaaatgtattccaataaaacattttgcgatagcanannaaaacgaaaaaat

SEQ ID NO: 2305 - DNA, 418 bp, Homo sapiens
gaaaagcaccaaggatggagcagcctggcctttgccccatgctggttcctgcaggtgcaaagggagaactactgctaatgggacagagaaggtccatgctgcacatggtgcagagatcaacaggtcttgagcctccagagctgtcagcctagtgcttttcatgcgccttaaaagtgaatcagagagaaaacaaagaagggtcactcttgagatcttcagtccctggcattgctggaagtaaatatgaagcatctgggagaaacagagactatattcaaaagtttacataaaactgaacagaggagggaggcggagaggggtgactggtgatgttccagagtaaaaaaagaaaaagaatccttttcaaatatattggagaactcctactactcatcattcagtaaaagccaatggaact

SEQ ID NO: 2306 - DNA, 394 bp, Homo sapiens
  misc_feature 25, 26, 43: n = A,T,C or G
gagtctgggagctcctgcttaagtnnaactgagttgaatacanggatgtggtcaactatactgttcttaccattgaaaaagaagtgctgaggccaggcatggtggctcacacctgtaatcccagcactttgggatgccgaggcagctggatcacttgtggtcaagagttcaagaccagattgggcgacatggtgaaaccccgtctctactacaaatacgaaaattagccattgtggtggcacacgcctgtaatcccagctactcaggaggctgatgtgggagaactgaaccctggaggtggagattgcagtgagccaagatggcgctactgtgctccagcctgggcaacaaagcaacactatgttttaaataaataaataagtgctgagatctc

SEQ ID NO: 2307 - DNA, 473 bp, Homo sapiens
  misc_feature 363, 418, 423, 450, 457: n = A,T,C or G
gttcctaggccccatccgaggcactgaataacaatctacagggaagaaagacatcagtcagattccaaaacctcccacggtctggcgataaacatcaaggaatcaatggcagaatactttcctgagaaattactccatgcccttgggtctagtgaagcctatttcatccatctcggagggtccatattctgtgagaaaatggccccgtcactcaagagtgatgaaatccgtggagcacggctgggctagaaatgattaccaaagcccgttaggagatgccaacagagactatattaaccatcattccctctgtcacagcaatcttgaatgaaagaggaaagaagactttctgctggttatggnatcttcgggaatcatctgacagcttatttattaaatgcatttaatattaattctncttgnactctagctgaccttcagaaacattcncgagtcnttaagaaccccaaagc

SEQ ID NO: 2308 - DNA, 301 bp, Homo sapiens
  misc_feature 30, 39, 73, 79, 88, 89, 90, 120, 126, 132, 135, 154, 193,197, 207, 216: n = A,T,C or G
gcgttatgtttattgagaggaacatctgangctgcgcantctctaaggaaaagaggtttatttggctcactgntctgcnggctgtacnnnaagcatggcacctgcatctgctcctatatnagttgncagctntgntccctcacacacaaagggnggtgttaagaagttacttcaaggactgatgtcagaggcnaagnactatattgnttttctgtnagtttctattagtagattttgtatgttacagaatatagaactagcagaatacaatgaatcttaatgaaccatttattaccctgct

SEQ ID NO: 2309 - DNA, 370 bp, Homo sapiens
gaactgagttgaatacaaggatgtggtcaactatactgttcttaccattgaaaaagaagtgctgaggccaggcatggtggctcacacctgtaatcccagcactttgggatgccgaggcagctggatcacttgtggtcaagagttcaagaccagattgggcgacatggtgaaaccccgtctctactacaaatacgaaaattagccattgtggtggcacacgcctgtaatcccagctactcaggaggctgatgtgggagaactgaaccctggaggtggagattgcagtgagccaagatggcgctacttgtgctccagcctgggcaacaaagcaacactatgttttaaataaataaataagtgctgagatctc

SEQ ID NO: 2310 - DNA, 212 bp, Homo sapiens
gtctctggctccaaagagtgtacacctgaggagttgtagccaagggttttcatcctcaactcacctgatgcagagcatgagatctaagactgtgaacctgatgcaatattgggatgagacccatggagatcctggaatgggaatgagaatattttctatatggaaaaaatgtgaataagtttcaaccagacagcagtctgtggtagattgcc

SEQ ID NO: 2311 - DNA, 196 bp, Homo sapiens
  misc_feature 98, 129, 157, 183: n = A,T,C or G
atcattcctctgggggaaaccaattgccatgtcataagcagccctgttgagaggaccacatgatgagggtgtaagcctcctgccaactgccatgttgntgagcttggaactgcagcaatggctgacatnttgacttgaaaccttacgtgagaccttntggattcctgacccacagaagctgcntgagataataaat

SEQ ID NO: 2312 - DNA, 188 bp, Homo sapiens
  misc_feature 106, 131: n = A,T,C or G
agactggatctcactacttgcctagctcttgaactcctggcctcaagcaatcctcctgcctcaacctcccaaagtgctgggattacaggagtgagccactatgccncacatggtattattattattgttantaatactacattgtgcttcataaataattgctaaatatacaagaatatgtttgtttc

SEQ ID NO: 2313 - DNA, 394 bp, Homo sapiens
  misc_feature 51, 367: n = A,T,C or G
gctctgaggggctccaagaagctggtgctgtctgtgtactcaagcagggcngcatccctgggggctacgtcaccaaccacatctacacctgggtggacccgcagggccgcagcatctccccactctcgggcctgccccagccccacggtggtgccctgaggcagcaggagggtgaccggaggagcaccctgcacctcctgcaaggaggggatgagaaaaaggtgagtggggtggggaaaggaggccagcctctcagacaccgtattctccctccgaacccagaacagcagagctgcttggaggccgcaagaagaggctggttctgtccaggctctgtcttccctcaagtctgtactgaaagggtggngttttttctttgcttttctttttgacc

SEQ ID NO: 2314 - DNA, 392 bp, Homo sapiens
  misc_feature 15: n = A,T,C or G
ggtttaccaggtaangtcgttttcctgggaaaaagaacgagttgaaaggaagagcaaggatccgctccggacctcactcctatattttgctgagatgaaaaccacaatccctgcactgcgagactcatctcataattagaaaacaaaggattatccaccgggttctctcccctcgccctgtggccttgctgctcccctgcagttgctccaaatgacaaaataatgacgggttcgccttgtgagagagggtggcctgctcaactccacgctggcgctctgaggggggcagaagatgcctcgtctcatttatgttgcaaacagccttaaaaaggacctgcagggcgctgggcgtggtggctcacgcctgtaatcccagcactttgggaggctgg

SEQ ID NO: 2315 - DNA, 387 bp, Homo sapiens
  misc_feature 330, 332, 334, 336, 338, 360, 361, 363, 370, 374: n = A,T,C or G
gcaaagattaaaacacatatcatgcccgggcgcagcaggctcacgcctgtaatcccagaactttgggaggccgaggcgggtggatcacctgaggtcaggagttcaagaccagcttagccaacatgatgaaactccatctctacaaaaatacaaaaattcgccaggtgcggtggcagatgcctgtaatcccagctactcgggaggctgaggcaggagaatcgcttgaacctgggaggcagatggtgcagtgagctgagatcacgccattgcactccagcctgggcgacaagaatgagactccgtctcaaaaaaaaaacaaaaaaaaccccncncntntnaaaaggtcctggaatcatttanntnatgggtntaanaaacttgaatttt

SEQ ID NO: 2316 - DNA, 636 bp, Homo sapiens
  misc_feature 12, 23, 45, 47, 54, 60, 78, 96, 100, 107, 117, 119, 164,310, 350, 353, 357, 358, 434, 441, 446, 485, 486, 489, 506,517, 523, 551, 552, 553, 564, 580, 586, 623: n = A,T,C or G
ttgtctattgcnccaaagggtanaagttcttggataaaaaacctngnttgaacngaaaanggtttggaaaagtggganacttgcgggtgatgaatnaaanaatgaantgccattggnangctcttggtggatgggaaatggataaagaagtggaaagaaatcancttccgctttcctttgcagaactgggccctatgatctgggatggtgggatgatgcgcctgggaaacaagtcaagcaagcaacttcccgaaagggacaaccgaagataagcaccttttcacaaaccttcggggaaaccgttcatttnccccgcttgaaacttctcaccaagcattgggcccatctcnggngggnngtgcttcttctttccttgggtgccacttgacttggcttggtggccccaacacaatgttgcttggccttacaagcanccttggngggcntttcctccgataaaaggggaaccacctttccttaatttnnttnctaaatttttttttttnggggaatcccngggaanacccccccttccaagccccttgaaagtnnnagggacttaancccttggggctttttntttttnaaaaaaaccaaaaagggggtttttttttggaaggaanaaaaccctttttt

SEQ ID NO: 2317 - DNA, 395 bp, Homo sapiens
agacagagttttgccatgttgcccaggctggcctggaactcctgggttcaagcagtcttcccaccttggcctcccaaagtgttgcgattacaggcatgagccactctgccaggccaagaagtctttcttaacggacccattccaagcacttcaaccctagagtttgcatggcagtgctctgcgtttcccttcaggccagtaataggattctggatggcgcatgggctctggtattaattcctgccagcccacacctgatgccaggcacacagcaagcattgttgaaaggatgaaggcgccaacctccacctacttcaccaccttcatcttgtccaatactgtccaaactcactttggagaagaataaacattctttgctctactttccactgctc

SEQ ID NO: 2318 - DNA, 143 bp, Homo sapiens
  misc_feature 65: n = A,T,C or G
gtcataagaagcttacagcattctgtggtatactgctgaagagtggtggtggttggaggaagcanatggcatgaaccctgccttcctctaagagggtgtgaaatgtgatgattcaggcttttaaattaaatgcataaagattc

SEQ ID NO: 2319 - DNA, 442 bp, Homo sapiens
tcagacttggctccacaactggaacaggccacagcttgcgaaagagcccatgagtcaattcaacagagatgagctggggaagagagaggaaataagaatcctacccatgattcaagtcactgtttaaatgctgcctacatcttcatttatgcttcaacgggatctcatgattttgtctgattctaaatctttctgctccatggtaaccttcaaaatcaacagccctgtgattatggtgaaaccagaattccggcagccactggaggggagcagaacaggcttggatatcattcaaagcctcattcccagagaattgtcattatttgaactgtttagtggttttctggaagaccccacttgcaagaatgtctttatttgacctgacctgctcagtgctaaaaatctagggacatttgttgcgctcaattaaaaaccattggtt

SEQ ID NO: 2320 - DNA, 625 bp, Homo sapiens
  misc_feature 8, 27, 33, 39, 46, 52, 73, 76, 77, 86, 98, 99, 104, 118,120, 133, 143, 157, 171, 174, 193, 206, 220, 231, 233, 240,244, 246, 252, 262, 290, 298, 307, 337, 382, 413, 450, 489,513, 533, 540, 577, 581, 592, 608, 612: n = A,T,C or G
ataagtgnttctccaagaatgatcccnagactngctaantgatgcntggacnttctactctggtggatggccntanncggaaagcnttggttgaaccnncaaanatggggatcaaggncntttgaacaaagangggatctgancgcacctttctccngcacagctttggtnaangaaaaggctattcaccttntggacttgaggcnacaacaagacaatnctgcttgcttntnatgcccnccgngntcccgncttgtcaagngcaaaggggccgcccggttctttttgtnaaagaccngaccttgtnccgggttgcccttgaaatggaaactgccangacccaggcaagcgccgggctatccgtgggcttgggccacagacnagggccgttcctttgcgcaacttgttgctcnggacagtttgtcacttgaaaccggggaaaggggactnggcttgctattttggggccgaaaattgccccgggccaangaacctccctggtcaatcttcaanctttggttccttggccgaanaaaaagnaatcccatcattgggggttgaaggcaaatagccggcngggnttggcataacncctttgaatacccggnttancttggccattttg

SEQ ID NO: 2321 - DNA, 161 bp, Homo sapiens
gaaatgaccagtgctttggttaagaatgcacattatactgcagttctttggggaatgaagccacccttgactgaggtaatcatcagttcaaaggcaactccttgttttatctttgcactaattgcttagagaaataaccagacaatataatttatgacaac

SEQ ID NO: 2322 - DNA, 162 bp, Homo sapiens
aggagaatgtgctggctctgatgttcagtgacaagggaacagagagaggtaggaaggcctgaaccagccaagagactttacctgaggtaaaaattcctcttccttcaatgcctcaaatcaggatcttgaagttggaaaataataaaagcttgtacagattcc

SEQ ID NO: 2323 - DNA, 505 bp, Homo sapiens
  misc_feature 271, 333, 392, 428, 468, 487, 489: n = A,T,C or G
ctgttgatatcgatggaattcctgaccagtaacatttccatgaagatcattacaatttatttcttgaaactctggggaggcatggaaacatcacattgcagcagatgctggggatgcagcaatgaacaagacaggccagatccctactctcagataaacacaatgatccaggtcagtaggcatttggtaggaatctgcatcaaactgttgggcaatggtagacagcaacattgacgtctgtaaatttacacttggattttaagtttctggntggctgcatccttcttctgaaagccactgctcttttcaaaaaaacctcctaaatggctaaanctctctgggttgcaacaagttgctctttttccttgagccttaagttaaggagtttgggnagaagtaatggcttcccccactgctaacttcaaggngctacactttctcttttctaagttcctaatctggcttacncattataaaaaacccttantnaaaaatccccaattat

SEQ ID NO: 2324 - DNA, 350 bp, Homo sapiens
  misc_feature 290, 294, 336: n = A,T,C or G
aatcaaaaagaaggatgggacaaaaatcagcaaacgtaaaaggaaaaagtaggccaggcatggtggctcacccctgcaatcctagtacgctgcgaggccgaggtgggcggatcgcttgagcccagagttccagaccagcttgggcaaccgtggtgaaaccccgtgtctacaaaaaaaaaatttagcctgtagtcccagctgcttgggaggccgaggcaggtggatcgctaggactcgggaggcggcagctgcagtgagccaagatggcgccatctcacttcacctgggcnacanagcaagaccctgtttccaaaaaaaaaggaaaataaaaaagtngtaaaaaaaatttt

SEQ ID NO: 2325 - DNA, 479 bp, Homo sapiens
  misc_feature 447: n = A,T,C or G
agacctgaattataacaaggctgcaggagttccctgtggccatccggaccctgggcagactgcaggaactggggttccataacaacaacatcaaggccatcccagaaaaggccttcatggggaaccctctgctacagacgatatctctgaatggtgccatggacatccaggagtttccagatctcaaaggcaccaccagcctggagatcctgaccctgacccgcgcaggcatccggctgctcccatcggggatgtgccaacagctgcccaggctccgagtcctgtgagtgctcacaagaattctacagtcttggcattgtgcccctacccccatgtcccacaaaaagcctcttctgcttctgtccaattggtcattttcctttctggagaatgggagcaacataagcttctgctgaaacctaccccaaaaagaaccgggtttgaagnacaagttttgcccttactaactggaatggatt

SEQ ID NO: 2326 - DNA, 505 bp, Homo sapiens
  misc_feature 313, 346, 348, 354, 387, 390, 420, 422, 429, 435, 438, 443,457, 459, 461, 480, 486, 487: n = A,T,C or G
tttgtcagtgtgcctgcgtggcggaatctgggccgtgtatggaaaagatatattgaagctgaagaggactgagagggtctttttttccatgagagtctcactctattgcccaggctggagtgcaagtggtgcaatcttggctcactgcaacctcctcctcccaggctaccaagttgctgcctcaacctcccgagtagctggaactacagtttacagagttgcagggggagccaaaaccttgccgtaatcctaccattcactgctgtgagtaatgaccatctgctggggactggagaagacccacccaatcaanttgactggcttgggttgcattgataaaaggaangncacaanaaggccaataggattgagaaccactcttccagnggngggaacgatctgcagccacccgcaaaaatngnttcactnttccantgnaggtnttttaaaaaatctntntntttgacatactcttttttnaaaggnngtcccaaaccaaataaaa

SEQ ID NO: 2327 - DNA, 461 bp, Homo sapiens
  misc_feature 266, 313, 360, 387, 395, 427, 433, 435, 444, 448: n = A,T,C or G
aacctgacctcttggcatcttcagagtggaaaacgaagcccccaatcttcctgcagggagcctcatcgtttccagcccggcagcgacttcacacgggctcattaaactcccaaataacagacttgctgtttggctttggggtttaagtggcctggaaccaaacccgaagtatagctgaggtatgcctatagtctaattaacttcacgaactgcctcgggaaagaatgaatgaactggaacttcatgcaaaagtgtatacaggccangcacggtggctcatgcctgtaatcctagcactttgggaggccaaggngggcagatcacctgggggcaggagttcgagaccagcctggcccacanggtgaaaccttgtctcttctaaaaatnaaaaaaantaacttgggcatggggggccatgcctgtaatnccactncnttgggaggnttgngccaaaaaaatac

SEQ ID NO: 2328 - DNA, 502 bp, Homo sapiens
  misc_feature 243, 258, 270, 277, 285, 299, 322, 371, 375, 395, 396, 412,418, 436, 437, 438, 439, 440, 441, 442, 443, 444, 445, 446,447, 465, 466, 471, 486: n = A,T,C or G
aaggcaggaatgtcaaggcctctgagcccaagccaagccatcgcatcccctgtgacttgcacggatacgaccagatggccggaagtaactgaagaatcacaaaagaagtgaatatgccctgccccaccttaactgatgacattccaccacaacagaagtgtaaatggccggtccttgccttaagtgatgacattaccttgtgaaagtccttttcctggctcatcctggctcaaaaagcacccncactgagcaccttgngacccccacttntacccgncagaaaanaaacccccttggantgaaatttttctttacctacccnaatctataaaacggcccccccttatctcccttcactgacttttttttangacngggcccccctgcccccaggnnaaaaaaaaaagccttnttcttnaaaaaaaataaaaaaagnnnnnnnnnnnnggggccgggggggcaatnnagttnggatttaaccaaagngggggggggtccaaaa

SEQ ID NO: 2329 - DNA, 427 bp, Homo sapiens
  misc_feature 334: n = A,T,C or G
gagactccttgtggaggggagcccctgcccgctcacctggatgaccatgcctcacctctgccgatcacatgcaaatatttgtcctgttctgagacatcctcctgggtcccagcttcttctcttgaagatacagatttccagtgcaccatcagaagccggagtaactgtgagtgggaggcattggagccggctgggaggtaagcattcgggccagcagggaggaggagtcgcccatgtagcagtgctggatgacaacattcccacactgccctcggacacatcacagaccctggtaccacaggatccctctgattcaactgaagaagagatgcanaagcttgcatgccaccaagtaactaattcgttcttctcttcttatatccattgagcagtgtgcagtgttggcacaatgcacagtacttgtcat

SEQ ID NO: 2330 - DNA, 427 bp, Homo sapiens
gaaactctctggatggcgaaaacttctcaaagtccataacatttatctgacacctcaactgtgaatttacatttcatttgcatgagtctcatgtctgcaactaggttgtggtgaccttgagaacgaggggatcaagagccttgtccagcactgggagtggaggtggttggaaatcccggacccccggtccaccagccttggcctcctgcagatgctaggctcaggatgaagtgcggccgaagactgctgggaaaagaaaagaaagagccctaatgtgccatatcgggcaagccgtggggtggcccactaactgcttttttatgattggcacttactggctctgatttaaccccacttaaagagtggtggcagcaattgtggagggcctcaaagggagactgatgcaagtgagggcaaagtatatata

SEQ ID NO: 2331 - DNA, 426 bp, Homo sapiens
aaacactcggaaggcccagcggggccacgctctgccaaagagaggctgacaaggagcagtgggagggagtggtggccgcagagaggggatgaacatgttcgtgggtgccaccacctgcctccctgcagtggttggacttctgtaatgttatgcaagtcgcccaggtcagggtgcgtgatgacgacaggaggcccagggaacaggagaaggctgagccgtggagcatacccatgccaatgccatttccagagctcttggggtagcagttgaggcccatttcctctcccccaagaacctacaacactctgggccccccaaaaacaaccccatccatcttggaaagaatgtgcagaaaagaggaaggaatggccacctgtcaactacattgtcacagtactgcacatgaccatcaccaaatgcccgcga

SEQ ID NO: 2332 - DNA, 243 bp, Homo sapiens
gtgtccttacaaggaagtgtggaagagaacagatgctaatttatgactccggatcaatttgctcaaacctgcacacaggcattagaggcagaagaaggacaccatttttccccccgtttggtatataccattcctctggttatgttgtttattgatatcctgcctccgtgtcaggcttaatacaaataaataaacaaacaacaatctctatttttttaaataaaggaagctttttaaccattt

SEQ ID NO: 2333 - DNA, 427 bp, Homo sapiens
  misc_feature 333: n = A,T,C or G
accctgtccgtcagccaggtgagcaagcctgggctagttagctgaaggataagagaccatgtggaggaagccagaggagccatccatctggggccacccaaggtcagccagcacctctaatcacagagccacgagggagttagcccagatttagaaggtgaggatattgacttcatctcttgatgcaaggagttgcagttacattgcaaagggatgcagatacagggaaggttggagaattgcagccacttttgcacaatctaccacaactactgcattgtagctgctatgcacattaaataaagtaaagacatatgaaacatttattttaanggtcctgacaacaaataagtgttcaacaagtgtgagctattattactgtttctaaaatggatcccttatcatgggagaaggtcaaattaatgcg

SEQ ID NO: 2334 - DNA, 426 bp, Homo sapiens
tttccttacaatcctgttgggtaccagtctccagaaagccactatcaatcagctaacgatggcattaaagagtcaactataggatcttccagaacaaggactacacttcaggaagatgaccttcaacataggagggaaaaatgtttcatagtcaatctagtaagaagttctgccttcaaagcaaaagaactaccatttattagatgtttgccatgtgccaggcaatgtcacaacccttttatatctcatttaagttcataatcatcctgtgacataagcaacactatgtcccccagtttacagatgaagaaactaaggctcaaaaaaaacattgtgaactttccaaagggcactgagctaggaagtagtgacactcggattcaaaccttggatctggcctactttaaagtccatggtctcaaatca

SEQ ID NO: 2335 - DNA, 434 bp, Homo sapiens
  misc_feature 334, 340: n = A,T,C or G
atggagttttgctctgttgcctaggctggagtgcggtggcaagatctcggctcactgcaacctcctcttcctggattgaagcgattctcctgcctcagcctccaagtagctgggattacaggcgcccaccaccacgcccagctaattttttgatatttttagtagagatgggtttcccgagtttcactgtgttggccaggctggtcccaaactcctgacctcaagtgatccgcccgcctcggcctcccaaagtgctgggattacaggcgtgagccaccaagcacggccccgcagcctccttcttgaaagagatgtccacaccccatctggcccntccttntcccttcctcattcctaacagctggcctcctgcggctgctcccaggatcttctgcagagtccggtccagccaaccccacctacctggctccggg

SEQ ID NO: 2336 - DNA, 433 bp, Homo sapiens
  misc_feature 17, 22, 25, 28, 29, 30, 33, 35, 50, 58, 61, 71, 121, 319,325: n = A,T,C or G
gaattgtctggaatttntgtgnaanctnnntanancgccaacgctgcctnctcctgantantaactgatcnagaactcatttatcaccaaggggatggtgccaagccattcatgagggatntgcgcctgtgatccgaacaccttccactaggctccacttccaacactgggaatcacatttcaacatgagagttggagttgacaaatgtccaaaccatgtctccatccaaccatctatacagatcttggattcaagaagccttatgcctcttggctaaaaagagtttgaaaatcctgactcggcccattgtgctaaggncatcanaaaatggattctgcagaagcagatgctgaaatactttggtgggcagggctcaacatctccagggacagggcagggcagaagcaaggagctaaaaaaactggatctcac

SEQ ID NO: 2337 - DNA, 425 bp, Homo sapiens
  misc_feature 7, 9, 17, 18, 21, 31, 386: n = A,T,C or G
gttcagntnaaaactgnntanaacgccaacnctgcctggatcctgactctgttgggattgttctcagagcctgctcagtgtacttggaaatgtccttcaaagcctgctaactctcatcatttcagggttgatctgatatttagaagcaactgaaaatcatttgaagccaatcccagtgaattaggtcatgtaattcagctgtaaaaatttgcccctggctgcacctggcataggagtggcacagaggggatcttgctgtgtcacccaggctggagtgcagtggtgcagtctcggctcacgacaacctctgccttccaagctcaagtgcttctcctgcgtcatcctcccacaggtgcatgccaccaggggttcaccatgttgcccangctggtctcgaactcctgcgctcaagtaatcctgtactg

SEQ ID NO: 2338 - DNA, 276 bp, Homo sapiens
  misc_feature 16, 17, 19, 21, 23, 27, 29, 33, 34, 57: n = A,T,C or G
agaactgagtcccttnncnancnctcncnctanncctcgcctttttgccttgtggangagcccatgtagcaaaggacagccaatagccaacagaaagctgatgccctcagtccaacagcctgcaagaaactgaattctgccagcaaccatgtgagattggaagcagattcttccgtgcagtcttgtgagagattatgaagcaaaggactcaagttgtgcccagattcctgacccacagataccgtgtgataataaatgcatattgtcttaaaccac

SEQ ID NO: 2339 - DNA, 78 bp, Homo sapiens
  misc_feature 26, 28, 37, 46: n = A,T,C or G
gcgtctggggagctcctgcattaagncnaactgaggnttgcatcgncagcttctatatattacggcctttttttttgg

SEQ ID NO: 2340 - DNA, 252 bp, Homo sapiens
  misc_feature 25, 26, 27, 28, 36, 48, 57, 66, 69, 83, 104, 105, 106, 108,118, 123, 134, 187, 235: n = A,T,C or G
gacgtctggggagctcctgcattannnnagagctgnggattcttatantgaaaatcnccccgggcntgngtttttaaacaaangacggaaatctttctttccgnnntnaaaggacacnttganagatgcagtangaagatggaatccatgaaccacgaagtgggtcttcagcagacaccacatctgncaacaccttgatcttggacttcctaagcctccataacagtgagaaatnaacgtgttttttaaacc

SEQ ID NO: 2341 - DNA, 425 bp, Homo sapiens
  misc_feature 27, 31, 33, 35, 45, 50, 65, 67, 70, 93, 102, 111, 143, 148,150, 157, 159, 162, 166, 207: n = A,T,C or G
ccatgttggaactacatttggaaaggnggtngntnattaaacaangacgnaaatttttctttccnanctnaaaggacactttgaaaggggctnccttctgangccaaaagnttcgcccactctggaatggagctgttacctgncatcntnagcacantntcncggnaacagaaaaccaagcactgcatgttcccacttataagtganagctgaacgagcagaacacatggacatatgaaggggaacaacacactctggggcctgtgaggtgcagggagagcatcaagaagaacagctaatgggtgctgggcttaatacctgggtgatgggttgatctgtgccggcaaaccaccatggcacacatttacctatgtaacaaaccttgacattcctgcacattgtaccccggaacttaaaaataaaag

SEQ ID NO: 2342 - DNA, 261 bp, Homo sapiens
  misc_feature 11, 31, 44, 48, 73, 83, 96, 131, 138, 185, 195, 202, 203: n = A,T,C or G
gaagatgccanaggctgactcacttcctccntctctctgtgcgngcanaaaggaaaggccgggtaagatgcangccatctgcnagccagaagacangcctcaacacagactgaaccctgctggattttganctggaanttccgccttccagaactgtgagagaaaaatttttgtgttgtttaagncacccactcntatattnngttatggcagcctgagccgattaatatgtacaacattctatataaaatatgaaacatt

SEQ ID NO: 2343 - DNA, 203 bp, Homo sapiens
gctgcatactgattcttaaaacatgaagaacatatggcatgaggatgaagagtggacaagaggtcaaagtagctgaaatatataaaatgctaaaagtgtaacaaaactgatttcaaccaagcacttgatctcaaccaaacaaaaatgtatgcacaaaagaaatatgtcaaaataatacaatttatgctcgaaaaaaaaaaagg

SEQ ID NO: 2344 - DNA, 124 bp, Homo sapiens
  misc_feature 8, 11, 14: n = A,T,C or G
ctaacggnacnggngcccagatgtgaggacaagagaaaggtggggtaagggatagagacggggaagacaatgagcaaacctagggttttttctggacattcaataaatgcctatttgagatgct

SEQ ID NO: 2345 - DNA, 315 bp, Homo sapiens
  misc_feature 14, 18, 25, 30, 44, 52, 53: n = A,T,C or G
tggggagctcctgngttnagctccngctgngggtctatgtggangtaattannaatcttcgagatcatcctggattatttgggtgggtcctaaatccaatgacaagcatccttagaagagccatcccggggagagacacatggaggagaaggccacctgcaggcagaggcagagactgaggtatgcagtcacaagccaaggagcgtctggagccagcaagaggtggagatgcaagcaaggattcttctgagagccttcagaggaagcacagccccgccaacaccttgattttggatttctagcctccagaactgc

SEQ ID NO: 2346 - DNA, 272 bp, Homo sapiens
  misc_feature 50, 51, 65, 67, 130, 188, 214, 218, 226: n = A,T,C or G
atattctttcagatcctgcatactgaaactactgatgccagctggtctgnnggattctatgggangntgactcaccaatgaatgaagtttccacatcctgatgatctcatccccttgccacaatgaatcnacagccccaattttccagccccttgccctccaaaatctccttaaaaaccccagtccanaactccccggaggatatggatttgangatncctctcgnctctctacttggctgccctgcaatcattaaactctttctctgctgc

SEQ ID NO: 2347 - DNA, 326 bp, Homo sapiens
tgagtccttggagacagggaccctgtcctgctgtacatccagagcctgacagaggccctgatctgagtgagctgcccgaattgctgaatggacagaagaacaaccctctgaatggtggaaacagctgcctccgaggcaccagccacacggtctggctttggtcaatcctgcacgattccgcaaggcacggtgactcacgcctgtaatcccaacactctgggaggccaaggagggtggactgcttcagctcaggagtttgagaccagcctggcaatagggtgaaaccccaactctacaaaaaataccaaatacaaaaatatatatat

SEQ ID NO: 2348 - DNA, 340 bp, Homo sapiens
agacggggtttcaccatattggttaagctggtctgaagctcctgacctcaaatgatccgcctcggcctcccaaagtgctggaattacaggcttgagccaccatgcccagccaaccctatagctttgcttgttcatcctgggaaggaactgtgcaagttggcgcttcgggcttggtataaaaacggctcctgaattcctgcccagttgtaatttccttggggattttgagaggggctcttcaacgttgccaggctatcacggcccttttgtttgcaagagagcagtgagtaaattatatcttgggcttagcaaagcaaaaaataaacacgatgacagtagg

SEQ ID NO: 2349 - DNA, 264 bp, Homo sapiens
  misc_feature 104: n = A,T,C or G
gtcccagctacttgggagtttgaggcaagaggattgcttaagcccagaagttggagcttcagtgaactatgaacagccactgcattccagcctaggtgacagangctataactgaagaagtgggagaaggaggaaaaagaaggggaagagaaaaacagcaagaacaaaatgaacaagaacaggaagaaagaaagaaaaaattaatttaatatttttcccttggaaaataaaagctaaattccaagaatatatcatttggatcat

SEQ ID NO: 2350 - DNA, 208 bp, Homo sapiens
acaaagatatttctggcaagacgtggagagaaagagtcccttcaatgaaaaaatgcaagactgttctgactgctttttcaggtaaacttcctgttggacctagttggcttgttaagtgaaggacaaaaccagaaggtgttctacatataaggctcactctgaagtttcaggctgctggactggttgcttcattacatgtactttgttc

SEQ ID NO: 2351 - DNA, 221 bp, Homo sapiens
gtctccaggaagtgtttgctgaatgaatgaaaagactagataacgctgcaagtatccaagacagtagatgattggctggtaaagcagaagcggtcgcctggaaattcccttctcccatgatttgcaaaattttgcttttgtatatttttctaagaaataatctatagcttttattatgtattccagggaattgataaacccctcaacaagttaagaaccat

SEQ ID NO: 2352 - DNA, 142 bp, Homo sapiens
ctctgccatgtgagaagacacgtagaatgtggctgtctgtagccagaaagagagacttatcgagaactaaattggctggcaccttattcttggacttcccagccttcagatctgtgagaaataaacatctgttgttgaagtc

SEQ ID NO: 2353 - DNA, 440 bp, Homo sapiens
  misc_feature 2, 3, 10, 19, 356: n = A,T,C or G
cnnggcacanaacatgtcntccaagttaggcatcatcgtcgcctgctcttggtgaagttttcttttgcgtactgcggagagatgcgctcattaccagctggcggtggagtcgctgaaacgcaaatggatttgagactgagcgactcccatctctatggttggtatgtgacccatctatcctctggaggactcagcaaggactaccagtcaccagacaactttacgcgcacgtggtcgcaaggtgaacttgctattggttaatggcagtaaagcccgcccatcagcgctggtctgctcctttaaaagaacgccatcgacgctcccctgtctttcagcgcctgcaggttccgggaggncagcttccaacccgaaggacgtcgggatgtcatcgtccttgctgctttgccaccccattcccgtcaataaagtggtttgaaccc

SEQ ID NO: 2354 - DNA, 460 bp, Homo sapiens
  misc_feature 29, 33, 44, 47, 51, 190, 192, 196, 200, 249, 273, 283, 294,302, 311, 316, 317, 326, 331, 334, 340, 342, 346, 352, 355,357, 363, 381, 398, 403, 405, 425, 426, 437, 442: n = A,T,C or G
gacgtctggggagctcctgcattaagatngagntgcggcttgtnggnagcncaactgggaaacctcgggaaacttacaatcatggcagaagatgaaggaaaaccaagcacctcttaccatggcagaggaggaaagaaagaaagcgaagggggagctgccacacacttttaaaaccatcatatctcatgananctcnttcnttatcacaagaagagcaggggggaaatctgcctccatgatccaaccacntcccaccaagcccttttcccaacntggggggatnccaattcgacntgaaattnggggggggncccanngccaacccntttcncantccatngngggngatagntgntncagtanctgtagtaaacttgcaanatattaactgtcattgncttgncnaaagggggctcattccaaannattattttgcnccatngggggacccacacagcca

SEQ ID NO: 2355 - DNA, 375 bp, Homo sapiens
  misc_feature 5, 23, 24, 26, 257, 328, 329, 330, 339, 341, 342: n = A,T,C or G
agatngagctgaggcttgcaggnnangctggtgaggaactcctcctgggctcaagagatccagctgcctcgacctcccaaagtgctgggactacagacatgcaccaccacacctggccttttatcctctttttagcaaatgcatttagggtttgtatttacctgtaagaacaggtttacctgaatttcgcatagtttgatagggcaatccttgcattgttctcagttcttaaaatttcaaaatttccattttgaaangttccctccttatttttggattttaagcatctttaaaaatctttacacaggcaaaaaaaaaaagggccggnnnggccaattnannttggacttaaccaggggtgaattttttttaaaa

SEQ ID NO: 2356 - DNA, 474 bp, Homo sapiens
  misc_feature 387, 389, 396, 404, 407: n = A,T,C or G
ggttaaactcccaaatgaagcagcaaacaaaaaacaaaccagtggctgagaggtctccaggggctgttcccctctttggggaacctgtagggagtgctgaggcggcatggttctgagtcacaggggacctgaggacacagggatggggcatgttgttccagaactccctccagcagctgcgtgctcaagcccttgtgtgctggtgagaggttggctgaggaaaggcagcgttcaaggtgaaggtgacagaaggcccaggtcaggctggatgaagacagggcccaggacgggcttcacacgtgaagctcgtggccccccttcctcctgcttccaccatcccgtcttggggcgttcttcttccaacgtcttgacttcctggggaatttntngggcatntttttccnttncaagtaccccccttcctgccttcaatgtccacaagtgggtgcagtgaatggacacttgtccaaacaa

SEQ ID NO: 2357 - DNA, 341 bp, Homo sapiens
atggagcctcgttttgctgcctaggccggagtgcagtggcacaatctcggctcactgcaacgcccgcctccagggttcaagtgattctcctgcctcagcctcccaaatagctgggactacaggcacgcactaccttgtccagctaatttttgtatttttagtagagacggggtttcaccatgttggtcaggctggtcttgaattcccgacctcgtgatccagatgcctcggctccccaaggtgctgggattacaggcgtgagccactgtgcccggactgaaactgactttgaacttctgtcttcagaattgtatgcgaataaatgtgtgttcttttaagcc

SEQ ID NO: 2358 - DNA, 197 bp, Homo sapiens
  misc_feature 4, 10, 33, 65, 99, 105, 109, 111, 121, 125: n = A,T,C or G
tacnaactgnggtgggaagccaatgccccagangtttgtgggcagcccacctttgcacccgtgangcaccagtggggaatgacagtcaagaagaaaccncggganaatncnaccccttggnccancagcaccacccccttgctttccggaactcagaagtggtggagaaaaaaaataaacctccttttttgtttatt

SEQ ID NO: 2359 - DNA, 335 bp, Homo sapiens
  misc_feature 35, 238, 255, 283, 309: n = A,T,C or G
cattttgggggggccaccgccaaccaaatggcgtnatgcacgtcgaataaagtgtgtgggaagttccaccgcttgtggaaccgccatgcaagttcgtgtactggatcccttgggggaaccaaacgaagttcacaagcttgaacaagttgtttcggcgaatggctttgaactggggcttgggtgctccatcattgtcctgctgggccaacaaccgtcgctttgaccttgttcgactttntgttaccaccttgcttnaaaatgccaaaagccaggaaccgggaanggatggaaatcatttaaaaaatgggncccctgaaaaaaaaaggccgaccggg

SEQ ID NO: 2360 - DNA, 451 bp, Homo sapiens
  misc_feature 380, 395: n = A,T,C or G
gcaaatgcgtaatggatgtcaaaatccagaaataaggcagcaagtattgcacagaatgtctgcattgactttgcaaagaccagaccctctgggttctccctggaacaaagatgcacaaaaggctggagcagccaaatgggccaacccctggagtgccttttttcttctgtgttaaaaagttgcatttcatgcagacccagcctattcccccaacccctcaatcttctccctccctcctacccacaagcacacatacaacagaagggacgcctctacaccctcaccagctgcctacactcattcacctgccgctggctggtttcggcacttgttttccaaaccagtcaaagaactcacagccccaggacttaaaaaggttnttattggttccatanaggcttaaatttgggggctcctaaagggatcaccatgggataaataaaaatataca

SEQ ID NO: 2361 - DNA, 479 bp, Homo sapiens
  misc_feature 336, 360, 364, 370, 376, 377, 380, 381, 382, 386, 389, 390,391, 394, 397, 400, 403, 406, 412, 413, 416, 426, 432, 434,437, 438, 440, 441, 460, 461, 463, 465: n = A,T,C or G
actgaggggcattcagataagccatcatatcccctgtgacctgcacgtacacatccagatggccggttcctgccttaactgatgacatttcaccacaaaagaagtgaaaatggcctgttcctgccttaactgatgacatggtcttgtgaaattccttctcctggctcatcctggctcaaaagctcccctactgagcaccctgtgacccccactctgcccgccagagaacaacccccctttgactgtaattttcctttacctacccgaatcctataaaacggccccacccctatctccctttgctgactctcttttcggactcagcccacctgcatncaggtgaaataaacagctttattngctnctaaancttgtnntgnnnacanttnnnatnccnctntgnttnttttgnnacnaatattgatngaattnanaannanngggggggggcggggggggnntntnttttttttttttat

SEQ ID NO: 2362 - DNA, 160 bp, Homo sapiens
  misc_feature 53: n = A,T,C or G
ggcatgtggcattctagacgtaacaagcattatgatttgtttgaaagaactgntaaacagtgtccagaattaagcacatttcctccattttctcaaaagagtttcctggagaagtcagaagaaataatacaatttcctattaaatgcaacatataaccac

SEQ ID NO: 2363 - DNA, 447 bp, Homo sapiens
  misc_feature 33, 35, 40, 44, 46, 56, 135, 209, 225, 373, 374: n = A,T,C or G
gtgcacacaatgaaggaaggccatggcccacananagaanatgntnaggccaggcntggtggctcacacctgtaatcccagcactttgggatgccgaggcagctggatcacttgtggtcaagagttcaagaccanattgggcgacatgatgaaaccccgtctctactacaaatacgaaaattaagccattgtggtggcacacgcctgtnatcccagctactcaangaggctgatgtgggagaactgaaccctggaggtggagattgcagtgagccaagatggcgctactgtgctccagcctgggcaacaaagcaacactatgttttaaataaataaataaagtgcttggaatttcaaaaaatacaatgcctannttaaaataccatatattatatattcatatggctataatgattccccacctgtttatctgtcctaacgcaaatg

SEQ ID NO: 2364 - DNA, 335 bp, Homo sapiens
  misc_feature 15, 16, 17, 69, 266, 274, 277, 279: n = A,T,C or G
ttataagttccttgnnnggacaaaagtggtttaacacttctgtctatctaaagatgtctacttcaaatnctgggcacaagagtgattgacagcaatttgattgattagagaggtttctttaagaagagcttttactctgaataaaatattcctgtgaggaagatgctgactggccatccaggtctgcagaagacaagaccagaggaaatggattttgaacatgttcccagagatcttttaaaaaattacctgcaaaggagtttaanccccggantancngaacaaagaaagctgagggtctctcctgaagtgaatgttttaaaaatagacagtct

SEQ ID NO: 2365 - DNA, 320 bp, Homo sapiens
gaaaggcaaagggaacctccaggatgatgctgaagacagagcccactatgacagctgtgcaactatcccagagcgcagacatggggcagagtgaaaagataacacagaactgggaagcaggcaggaaacagcagaagagaagaaagttgagatgaagaaaaaaatatgaacgaaggcaatgaagtaaggggaagatggagacaacttttagggcttttactataggttcactgtttctaatataaccatcagaatcttctgtcacaaaaggttacatgttgatggaaagaatacaggaaaataaatgagatctaatttac

SEQ ID NO: 2366 - DNA, 795 bp, Homo sapiens
  misc_feature 16, 22, 31, 36, 59, 107, 338, 344, 348, 409, 431, 439, 443,449, 457, 462, 467, 472, 480, 482, 488, 492, 500, 504, 506,519, 527, 539, 557, 602, 617, 618, 623, 638, 653, 674, 678,686, 688, 689, 698, 699, 715, 736, 758: n = A,T,C or G
acatagggagtgtatntccccntccccaagnggaanggcattggaccttggacttgganccatgcatggcgccctaccctcaatgggaacgagggccgtcgtcgacnagaacttcagtgcactctaagaacgtcggcccaaggacctattcgcatgggactaggcagctaggacacatatggaattaaatccaacgacggacaccttagtgagtacacgtctaggtgtccaagggcaaaaaacgatggccacgtacatgcacgaacacgaaaacatgttatagtaggtaatcgtatatgtacaaccacaaacactcactagtatatccgtagacgagncgaaantggnaaaagttcaacgagtgcgcatagcaatggcgcagcaccaagagcatatattttaagagtgncctttgtctcaccataattaangggttgtncaangttggntttttccntaaantaatnaaaanaccaattncngggaanattncttttccntggncncaccaataaaaanggggcatnaccccttggttntggcatttgggtagaaanggaaaatgaccccgcggaaacatattttaataattggaaaggaancctctttgtttgtgnnccctnaaaaaaacattttgngattttttttttttntggggcccggcgcgtgggggngggncaaaattngnnattttcccnnggggttttttttaacncccccggggttttccgaaacntttttggggtccccaaaaaaangggggggggggccccccccccccccccccttttttgg

SEQ ID NO: 2367 - DNA, 264 bp, Homo sapiens
  misc_feature 25, 34, 45, 51, 61, 90, 112, 147, 188, 240: n = A,T,C or G
gctcatgaatctctgtgatgctcangagctcaancgttctgttgntggcancttttcctcncctggtgccacgttaaagcggatttggantttatctggcttgctgattgcntaccatctccccaaggagttcaaattcccacagtntaccaacacaactgatgctggaagctaaacttgctacaganaactgagagaaccaaacaattttcctttacctgttctcacgatacttgaaantaaatgtctacatggaaggaaagc

SEQ ID NO: 2368 - DNA, 566 bp, Homo sapiens
  misc_feature 126, 135, 136, 145, 146, 147, 158, 159, 167, 171, 175, 179,181, 189, 197, 276, 281, 301, 311, 319, 322, 327, 329, 356,380, 393, 419, 424, 435, 506, 512, 532, 545, 547: n = A,T,C or G
caactcagaggagttaatgcccatgaggaaagcagctttgtcagcatctggtcatcagaaatagaagaaaaggaaggagagaggaaaacactgttaagattcattccattatagccaaactaactnccccaaagnncaaaagaannnggggttacctnnacggaacnaaanaaantggngntttcaaanaaatgccngaatcctaaaagtttaaaggaaattatttcttcgaaatacaagtcaaagccacattgaaatctcactccttcagtttgntggcnttaaggaaaaagaaaatatnatgcccctcnccgccccnttnatggncnttattcaaccggcgcacattaccaggngttgacaaggatggggaaaaatgngaaccctcatgcnttggggggtgggaatgcaaaatgggngtgtntttgccggganaacagtttgacagttactctgaagttaatcatagagtactatggaacccaccatttcacttttaggtcccncccaanataatgaaaacatttgttcncccaaaaattggncncaatgtttctagcaccttt

SEQ ID NO: 2369 - DNA, 90 bp, Homo sapiens
agaacaaatgatgaatggaggaggccactggtttacacggaaagggtaaaggacaacgactatccagatttttcttccaactttactttt

SEQ ID NO: 2370 - DNA, 550 bp, Homo sapiens
  misc_feature 316, 324, 329, 338, 362, 366, 368, 370, 373, 378, 382, 396: n = A,T,C or G
aggatcctctattaaatgtgtggtccatgaaccagcagcttcagcatgacctgagagctcataacctcgtctctacaaaaaatacaaaaaaagttagccaggcatggtggtacacgcctatggtctcagcaacttgggaggctgagatgtgcctgctttcctttcaccttccaccatgattgtaagtttcctgaggcctccccagccatgcttcctgtatagcctgtggtacggccaagtctcgccacatggcatcatttcctcctcacctgcagaatcgctgtgacttatggctcctctgattgcacctgctttnaccaacanccctngaaaaaaantcttttttgtggggataaaaagtnaganananctnggttncatnacttggttaaaatnggaccctctcaaatgaatgtaagcacataatggggggactacactatgagattaaaaggaatccagctgttaccaaaaatgggtgcctgccaggtttatccaccaaattctttccacttcatgtcattaaaaataaaatttgagttttaaaatg

SEQ ID NO: 2371 - DNA, 400 bp, Homo sapiens
  misc_feature 37, 244, 317, 332, 336, 347, 368, 382: n = A,T,C or G
tggcaaaaattcccttaaagaaaaggccccgggaagnggaagccttgtggaagccccttgggaatggttggcttggcattggcccaaaccaatggaagggaaaaattcccgggaccaccaccaaagaggaaggaacattccaagggggggccaccaaaggttgccgccaaagaatggaaaccaaaggccaccattggaaagaaaaggggccaggcaaaggaagggggaaaagccccattcttgncaaagccccaagaaagaaggaaggaaaagggcttcaagaaaagaaaaggtttaaaggttcttggcccagccantctttgaaccctttngganctttcccaagnctttttcaagaaccttggtgnagaaaaaataaaanttttcttggcttggtttt

SEQ ID NO: 2372 - DNA, 578 bp, Homo sapiens
  misc_feature 245, 317, 318, 330, 332, 358, 359, 368, 379, 383, 402, 405,416, 429, 440, 448, 464, 472, 475, 497, 539, 549: n = A,T,C or G
ggccatcaagctcagatggtcttacaaatggcaccccaaatgagctcaactcacaacttctactgaggacccctggaccaacccactggccctttgactggcctagagaattcacctccagaggacactacaactgcagggccccttcttcgcccctatccagcaagaagtaactagagcggtcatcacccaattcccaacagcagctggggtgtcctgtttagacgggggtggggggagattgngaggtgaagccagctggacttcctgggttgactgcagacttggagaacttttctgtcttaccaaaggattgnnaaatggcccatncncccttttgtaaaaacccaccaatcanngctttgtanctagcaagaanattntaaaatgccccaaccagcnctntgtaaaatgcnccaatcagcgctntttaaaatgcnccaatcancgttttgtaaaatgcnccaattancanggatcctaaaagtggccattcncagggagaactgaaaaaaggccctcggttaggaaagaaacanacgggggganggggccaataaggggataaaagctggcct

SEQ ID NO: 2373 - DNA, 408 bp, Homo sapiens
  misc_feature 13, 16, 30, 37, 43, 44, 46, 49, 50, 51, 55, 58, 60, 61, 66,77, 79, 80, 83, 89, 107, 110, 124, 297, 344: n = A,T,C or G
gaggaagaggcanagnacgacggctcaatnaaacccnccactnntngtnnngganagngnnacttncttttggtctnanngcncttcangcttgaaccaccatgaangcngaaattccatccanttaccctggaagtgggaaaccgacaacctgcatggcattttttgaagctagacatgtaaacatcatttaaaagttctgttttcttggctcacgcctgtgaccccagcactttgggaggtcaaggcaggcagatcatgaggtcaggagattgagaccatcctggctagcacggngaaaccctgtctctgctgaaaattcaaaaaattaacccggtgtggtngtgggcccctgtaaaaaaacttctcgggaaggctgaggcaggaaaatggcgtggaaccttggga

SEQ ID NO: 2374 - DNA, 186 bp, Homo sapiens
catcatgcaaactgggaagaggaccctcaccaggaaccacatctgccagcaccttgatcttgaacttctcagcctccagaacggtgtcaatggacgtggacgtgtccccggattaagcatgaccttggccctcctgggtggacgtggaggcttcagaaagattcattaaactactttccaaagctt

SEQ ID NO: 2375 - DNA, 274 bp, Homo sapiens
agaaacaagcatcaaccccttcaccacggcacatctgcctctgacttctaagcgctagaccaacctatggatcctgtcatccacctccacatcctgcatgggaatccaagaacccttcatcatctacctcagtctccagtgggccagcaaaaccaccaagctctttctattgccacagctttgtcatgtgcctttctactcattctgctcttagataatcacgtgatgtaataacatcactgctatgtctactaaaaagaaatctgagaaactg

SEQ ID NO: 2376 - DNA, 319 bp, Homo sapiens
gagcaccatgcaaagtgcggagatgcagagaggaaagactactcggtccttgttccttgctgtcccagaggtcacagtgctgtggggagggggacaaggacataccctgtcaggctgcgtatataaatacacaggtgctaagcaaaatgggaacggagaagggaaaggttccctccaccttgagagacccacagaagggtgttctagagatggatgagtcagactgcaagagagcaaagatatcttcctgaatacattcaatatcaaagcatcatgtgccctgtgtgtgcaaaataataataatcataataataaagtt

SEQ ID NO: 2377 - DNA, 433 bp, Homo sapiens
  misc_feature 417: n = A,T,C or G
aacttaagccaaaccattctgtcatctggaaaaacaaaaaatagaagcttgggccagatcatctgtaagatttcttcccaagcacaacatcagatccaatgactgtcaactgagtgtgtgccaatgacttatttgaaggttggaacaaaccacataatcaccagattccccacattcagataagcctcaatgaagaccgtataacaccccctgaagaacagctgccatctctgcaggattctgtgagaagagggaagtgatccggacctcttggctggggccacactgggtttatctgtatctgctcctgaatcttcagcctgctacaatctgttcacacctgggtatctacagtcttgacatcctaccacttgctgctcaaggctcttaacttgagctggaaagtaaataaattgngctttcattttcccct

SEQ ID NO: 2378 - DNA, 454 bp, Homo sapiens
  misc_feature 167, 326, 327, 341, 350, 355, 362, 379, 381, 394: n = A,T,C or G
gatcgaggccatcaagctacagatggtcttacaaatggcaccccaaatgagctcaactcacaacttctactgaggacccctggaccaacccactggccctttgactggcctagagaattcacctccagaggacactacaactgcagggccccttcttcgcccctatncagcaagaagtaactatgagcggtcatcacccaattcccaacagcagctggggtgtcctgtttagacgggggtagggggagattgagaggtgaagccagctggacttcctgggttgactgcagacttggagaacttttctgtcttaccagaggattgtnnaatgcaccaatcancactctgtntaaanacaccantcagtgcttcttgtagntngcaagaagatttntaaaatgcacccaccagcacttttgtaaaatgcaccaatcaggcgctttataaaaatgcc

SEQ ID NO: 2379 - DNA, 175 bp, Homo sapiens
atgagaagcagggattcccagcaaaggagaaccatgagtcacagggagaagtctggccggaagctgctgacacacattctcacaggactatggcaacttccggaagctgcctgtatgccttgtcttgtggccccttcctccctcttcagtgccagcaacattgcatttacctgac

SEQ ID NO: 2380 - DNA, 377 bp, Homo sapiens
gaaaagccttgaaaatttttggagtacatatagtaagaatgcacttcactgcagcaaaaatggagtttcactcttgttgcccaggctagagtacaatggagtgatctcagatcaccacaacctctgcctcccaggttcaagctattctcctacctcagcctcccaagtagctgggattacaggcatgtgccaccacacccagctaattttctattttttgtagagacggggtttctccatgttggtcaggctggtcttgaactccagacctcaggtgatccacccgcctcggcctcccaaagtgctgggattacaggtgtaagccaccgcacctggcttaaaagtaaattttaaaaataaacagtttataaattaag

SEQ ID NO: 2381 - DNA, 260 bp, Homo sapiens
tagatgcaatccatggaacactccacgtggacttggctgtttctccgcattcatggacaattaatttccagctataatccagtttcccaccaaacactgagttgcctcccaacgctgtcgaccacttgctggaacaattgtcccccctttgcatgggaaagcaagatatcatgacactttgttctgatgtgcaaaacatgcctggttttgagaccctggccatttccattgtcagtctttaattaaatcagtggttttct

SEQ ID NO: 2382 - DNA, 435 bp, Homo sapiens
gcaatccaggtgacaatacggaagtttcaggaactccatcatatccagcatgtcaggatctcacatgaacgaatggcatattccactccatgtgagaaaggctgtgatgccatcatggaaaagatctagctttgaaagccagaaagaaggaacatcagccttaacacttgggagtaatgtgacctggggttgccgagtgccttactgaacaatagctctgactggctgaattcatcaacccaagtttgtgtatttagatatcatctatgtatctccgaatctgctcctcaacacacagctagctgtcataatacataatcaactagtatttctcaacaagcaaattagtagactgtcaaagggattgcttaaccatatgcttctctcattactacataatcccagaaaataaaagtaacatttgtttagaatgac

SEQ ID NO: 2383 - DNA, 437 bp, Homo sapiens
  misc_feature 359, 374, 422: n = A,T,C or G
gggcattcagataagccatcatatcccctgtgacctgcacgtacacatccagatggccggttcctgccttaactgatgacatttcaccacaaaagaagtgaaaatggcctgttcctgccttaactgatgacatggtcttgtgaaattccttctcctggctcatcctggctcaaaagctcccctactgagcaccctgtgacccccactctgcccgccagagaacaacccccctttgactgtaattttcctttacctacccgaatcctataaaacggccccacccctatctccctttgctgactctcttttcggactcagcccacctgcatccaggtgaaataaacagctttattgctcanaaaaaaaaggccagngaggccaattcagcttggacttaaccaggctgaacttgctcaaaaggnggggccccccccccc

SEQ ID NO: 2384 - DNA, 328 bp, Homo sapiens
atggagtctcgctctgtcgcccaggctggaatgcagtggtgcgatctccggttcatgccattctcctgcctcagcctcccgagtacctgggattacaggcgcccaccaccatgcccggctaattttttgtatttttttagtagagacggggtttcaccgtgttagccaggatggtctcaatctcctgaccttgtgatccgcccgcctgggcctcccaaagtgctgggattacagacgtgagccaccgcgcccggccccaacattcttttttgcttgggataaaccctcttcaggctgttaatcaatatagataaaagtatactgttct

SEQ ID NO: 2385 - DNA, 450 bp, Homo sapiens
  misc_feature 392: n = A,T,C or G
ctcaggccagtaattttgacagaggtttgtcctgtattgtggccagggagcagcccagaaaaacttgcgtcactaggcccagtggggtgtgctccatcagacagaatgtgtgtgtcacgagccttctaagaatcaggaggagggaagtcattcataaaggaggcagatgctgaaatgcaactttggcttcctcttccaagtccttcaactataggaatgtggccctttcttattcacagaggggctggatttctctttacaacctgagtaccagaagctccctacctttccaagtcagaacagaacaggaaagtggctaattcgacctttgcattctccacactgggggagatcacaggccaggctgcacacctctcaaaacccaacctcangacagacgtctacagggaatgctaagactttcgaaagcaggagaaagatatgtccaga

SEQ ID NO: 2386 - DNA, 245 bp, Homo sapiens
  misc_feature 201, 211: n = A,T,C or G
atcacacaaagaagaagtcatgtgaacacacagcaagaatgtggcagcctacaagtcaagagaagaggccccagagtctaccttgcaggcaccatgatcttggatcttccagtcttcagaactgtgagatgtacatttctgttgtttaagcattcagtctttggtatgtttttatggcagcctcggcagaataagacactnattcatctangtataccatatacagttgacccttaaacagcatg

SEQ ID NO: 2387 - DNA, 440 bp, Homo sapiens
  misc_feature 385, 396, 401: n = A,T,C or G
agcttttgtttcagctcaccttatgaagctgtttcccaagaggatgacccgggtgcctgcctggctaagtaacaagcaaacatttcggagcctaagtttgggaaagagcctgaaggcccctacaccctgaagcaacattccaagccttgctgctcacaatgcggtcccgggaccagcggcagcagcagcagcccaggacgcttgttagaaatgcggcacctccggccccacttcagacgttctgaacccaaatctgcattttatcacgatcccaggtgattcatgtgcccgttagagtgagcgaagccctggattagagaacagaaattagacgtgaccctttctttgacaggaatttatcaccaggctctatctcaagaactgngagaattcggntcaanatgtttgtgataacttttgagcagtactgactagcgtgg

SEQ ID NO: 2388 - DNA, 334 bp, Homo sapiens
  misc_feature 6, 7, 8, 38, 48, 56, 67: n = A,T,C or G
caaaannncaactgcagatgacagccctatcgctcctncgactaccancccattgnatgtacctggnttccccatccaagccaaagagccctcttctgtgcctggactaagaaacagaatgaaaaaaccacacagaaaatcataagctggggaccaaaggcagtcaaccgtttctgcatatgcctcaaaatgtgactcaatctagaggtttccagtttcacctgagctgttaaatttacaggaagatcttcaatgatcttcggaaaagacagaagagcaagaaaatctgaaaaggatattaataaaaattaagctcaaaggggaaaaaatagtt

SEQ ID NO: 2389 - DNA, 352 bp, Homo sapiens
  misc_feature 320, 333, 335, 339: n = A,T,C or G
atggagtctcactgtgtcgcccaggctggagtgcagtggcatgatctcggctcactgcaaccgccacctcctgagttcaagcgattcttctgcctcagcctcccgagcagctgggactacaggcgcgccaccacaccaggctaatttttgtagttttcgtagagaggggtgtcaccatattggccaggctggtctcgaactcctgatgtcgtgatctgcccgcctcggcctcccaaagtgctgggattacaggtgcagccaccgtgtctggctgctccattgtaatcttacgggaccaccatgtatatgcaatccttggntgactgaaatggncntaanggggggattgaat

SEQ ID NO: 2390 - DNA, 525 bp, Homo sapiens
  misc_feature 406, 415, 435, 453, 463, 486, 492, 509: n = A,T,C or G
gcccagtccacaagggcaaggcttgcaagagaggaaggaggaatcgcggagcagcaaaccaaagccaggcctgtgtcttgagagggcttctcaccaagggaagcttccagggccttctccaaagcaccatattcaagcactggatgctgcttggacatatcaattgaggtcccagagaaatcagtatggggagaagaaggacttggaatcacacaaacatgggtccgaaccctgcttgcccttcccagctgggtaaactccagggtctcactctgttgcccaggctggagtacagtggtgcaatcatgggtcactgcagcttcaactcctgggatcaagcaatcttcctgcctcaacctccccaatagctgggactcctgaatagacaagggtcccactatgttgnccaagctgntctcgaaattttggctcaanaaatcctccttgcttggnctcccaaagngctggggtaacaggcgtgagccnccttgnccaacctattatagtcntattcttacataaata

SEQ ID NO: 2391 - DNA, 366 bp, Homo sapiens
ttgaatccaggcatgtggaacccttggatatggaaggccaatgatattttgcatctatgatcttattgaaacctatttaccaagtcacgaggaaaaaagagctgaaggacaaatgatgctgacaaggggacagtcagaacctgcatactttgaatgcaataccagggcactagtgccaagagttacaaaagaagaagagccttttaactttggcgggagtgcagaagggaggaccaaaattgtaatttgaacacattattgagtaagatcatataatggaaaaggaggaaactggtttaaagagatgaaataaaggtagaggttaattagaactaccaacataaatatatgcccttttaaaagaag

SEQ ID NO: 2392 - DNA, 377 bp, Homo sapiens
gcagctcactatgaggctatcacaaatcaatggaagcacatttggtgaagagtacaggcccatcagaggataccactgaatccatgctccacagcagttcccagcaagctgcactcttcgaaggcgggatgctgaaacctctgcccccaccccctacattagctttatatccaaatgtgactcggaggctggtgagctcaaggtgatcaatgacagctccaatcaaagccacccagtagacagtgcactcaccactccttgatataaaaggtgttttatttctcatccttttatttttgtcactgaaagaatgcttcccatgtgtggattaattaaagtgtaaacattaaatattgattgatgcattatcagcatgg

SEQ ID NO: 2393 - DNA, 392 bp, Homo sapiens
actatcctaaacatcctgccattaattagctgaacagcccatctagtaaacaagaccgatggttgaggggctggaaaagaggaggagtcagcaagttgaaagtcacaacagaccagcccactccctcagataaaagaaaggcacatcacagttgtcacatcagcaggctagaaaagccatcccattcctgcggcaggcattctgtcaaagaaaaagaaatctgcaatgaattatcacatgaagtcaaacaaggaaaggaggcaaaaagcaagcagagccctcttcctgttttgtagactctgctggctacaatctaatagaatgcttaatctgaatatttctggtggcaaaactatagcaaccattctgtctattaaaaagtcagtgtggtt

SEQ ID NO: 2394 - DNA, 397 bp, Homo sapiens
tgaaacacatatccaagaaaaggtagtctgcaggaaaactggaggaagacttatgcttagagtccttgctctgcaaacttctacaggaaccagtgtggacttggaggccttagcaaactatcacaggaacagaaaaccaaataccgcatgttctcacttataactgggagctaaatcatgagagcacaaggacacccagagaacaacatacactggggccttctggagcggggagagcatcaggaaaaataactaatgtactaggctaaacacctggatgatgaaataatctgtacaacgaatccctaggatgcaagtttacctatgtaacaaacctgcacatggacccctgacttaaaagttaaaaaaaatgagtgattaaaaacattaaaaaatg

SEQ ID NO: 2395 - DNA, 310 bp, Homo sapiens
  misc_feature 21, 34, 265, 272, 274, 288: n = A,T,C or G
attttacccaaatatgtggcnagttaagacaganaaaagaaagatgtgaggtctcagagatcttccaatgggacctaccactatgggtcaagtcatctgacatctacagaaaacctacattgcttcttttaacatacaaatataaacaaacgtacaatttaggtaggggcctcccacaaaataatcacctgatcagaattatatattaagttatgcttaatatattattatacattaaatatatgatttaaaacaaaaaaaaaanggccagngnggccaattcagctnggacttaaccaggctgaacttg

SEQ ID NO: 2396 - DNA, 315 bp, Homo sapiens
gcatggttatgaagctgggaacacagcagcaaacatgagccgatgaagtctctggtctaaaaaaaacctgcactgtagtgataaaattaagtccaaccttaaaaagagtttcaaaatttaagaatgaggaggaagaggggcacctcacgtaacaggaagcagctacgacagcaaagaggaacagatactgccaaataagggttcatactcatacccccacaaaggaaatctcttaattggagacatcatgagatctgggccattttcccatctcattgaaaaatcaatgtttaaataaacacactttttatctag

SEQ ID NO: 2397 - DNA, 343 bp, Homo sapiens
  misc_feature 12: n = A,T,C or G
tttttttctagngttcaaaggccggcggatcatgaggtcaggagttcgagaccagcctgaccaacatggtgaaaccccgtcttcactaaaaatacaaaaattagcctggcatggtggcgcgcacctgtaatcccatctactcaggcggctgaggcagaagaatcgcttgaacccgggaggcggaggttgcagcgagccaagatcacaccactgcactccagcctgggcgacagagcaagactccgtctcaaaaaagaaaaaaaaagaattttttctaaaacttccaataaaaacttaggtcccattaaatggtaaatctggctccaaaaaaaaaaagggccag

SEQ ID NO: 2398 - DNA, 183 bp, Homo sapiens
  misc_feature 26: n = A,T,C or G
agacagcatctggctccatcacctangctggatgcagtggtgggatcctagctcactgcagcctttgaactcctgggctcaagcaaccttcccgtctcagcctcccaagtagctgggactacaggcgtgcgctaccatgtgtaatttccatttttaaaaagcacattaaaatcagagagtttt

SEQ ID NO: 2399 - DNA, 517 bp, Homo sapiens
gccttgcctcgggactgggcagtttatccgcagagcaccaaggaagaatgtgtgcccactgccaactacaaagaatcatgggatcataaaccctcagaagtggaggtatcacggaaatgagcttaatgttttatgctttcctgtcgccttaaactgccaagaaggctggtgcacctcagaggaaagaatactcacaggaattagtttccggtccctgaaacccagtcatttcaacatgacagctgtttgaaatcccatgtaaccagagggtttctgagacaggaagcaacagtggcacacctagctgagcacgggggagagtaagaagcagagaggaaacaagctgaatgagaacatggcttggaggcagcaaggaaagtataaaaacaatgaaccaggccaggcgcggtggctcacgcctgtaatcccagcactgtgggaggccaaggcaggcggatcacttgagatcagaagttctagaccagcctggccaacatggtgaaaccccatctctact

SEQ ID NO: 2400 - DNA, 198 bp, Homo sapiens
  misc_feature 94, 100: n = A,T,C or G
actataacaatgaccccctatgaagaaatgcttccaagaccagcacaccagaaagaacctcctgatggtgagcagggccagaaccaccacctgnctgtcncaacactaactcttcatttgattcctcttgaagtttggcccgagtgtgaaaaatgactcttcttttaaggactcgtaataaagcagaggtgacacaga

SEQ ID NO: 2401 - DNA, 122 bp, Homo sapiens
gtgtttctttatagcagtgtgaaaatggactaatacaccagaaagaaaaataaatgcaagggaattttctgggttaaagaaaaataaaggaaagtgacaaataaatgtaatctaagatcttc

SEQ ID NO: 2402 - DNA, 456 bp, Homo sapiens
caattttgctccaggaagtccttgggacccaggctcctgtcagctcaccattctatcagcccacagttaagactgtggcatgtgcattccagacagcaagactgagaaaggatcctgaagaagagagacaagggctgtctcttagggaaggctccacataaaactaagctgccacatgaaacttacgcttactctgcaatagccagaactcagtcccatggccatgaaagatacaaggacgcctctgttcttggaagtcatgttctggtcaaaactggaggattctatcacattagaagaatgagaaaacagacacctggggaaaactacattttctatcatgggaacagcactctattcaagtgaactcacaattataaatgaagctactataattctgaacaatgtaccacggctaaaagtgcttcattcactttacttactcaataaatttaa

SEQ ID NO: 2403 - DNA, 475 bp, Homo sapiens
  misc_feature 339, 371, 385, 387, 411, 425, 430, 448: n = A,T,C or G
acgaagtctcgctcttgtcccccaggctggagtgcaatggcgcgatcttggctcactgcaacctctgcctcccaggttcaaggaattctcctgcctcagcctcccgagtagctgggattacaggcgcctgccaccacgcctggctaatttttgtattttaagtagagatggggtttcaccatgttggccaggctggtctcgaactcctgacctcaggtgatccactcacctcggtctcccaaagtgctgggattacaggtgtgagccaccgtgtgcggcctcagggaattgaacagcttggacttggagacagtgagttaaaacagaaataagaaggcngccgaaaaaaaactccccaatggaatggggtnggatatttcatatncnccccaccacctcaaaaatggtggnccttgggagggatnggaanacaagaaaattgggaggngatgcatctttcaagccttaggaaaca

SEQ ID NO: 2404 - DNA, 426 bp, Homo sapiens
  misc_feature 369, 385: n = A,T,C or G
cagctccagggggtcctcccatgacaggaattcctgatgagaagaaaaggtgcagctctctctgacaagctggctcctctcctcagaaaaaagaaagaaacaaggagaagaggatgacattgaatgtatcagagaactaagaaacttctgccagcctgagcaacttctccagccagggcgacagagcaagaccatgtctcaaaaaaacaaacaaatgaaaaaagaaatttctggatgaggaggatgctagctctacattccacttcacaaccaggccctacatcagcctatatttgaataccatggcaattcactaccccacgatctgtgaggaaatttttccttacactaaacagattgggccagttncacactttgggactgncagaaaaagcctatatatctaatataatttattataaatag

SEQ ID NO: 2405 - DNA, 448 bp, Homo sapiens
  misc_feature 356, 365: n = A,T,C or G
aggatcatatgaaattcataaacagaggatgaagaaacacagaagacagaggaaggatttagttttgggaacatgtgctaatggccatcaaacaattctgaaataactgaaagagaacctttgaaacaccctttagattaagagcctggcttgtaatctgtaacaacaaacggtattacaatgagaaaaataaatgtcctgtcaaggcattccttcaatgacatcttgtcacacaagtctatatccaaggctgcccacaaagtggaaaaatggggaaaattccctgcagtacagggccaaaaactgaagtggatgtcactgtcttctgtcctaagaaaaaagaggataaactgtantcccaaccncttccgaagcttgaggcaggagaatggcatgaacccgggaggcggagcttgtaatgagtcgagatggcgccctgcactcccaa

SEQ ID NO: 2406 - DNA, 496 bp, Homo sapiens
  misc_feature 29, 34, 35, 53, 56, 373, 395, 398, 436, 479: n = A,T,C or G
gacgtctggggagctcctgcattaagtcngaacnngagggtaaaaaaagtatnggntggcacgggggctcacgcctgtaatcccagcacgttgggaggccgaggcaggtggattgcctgaggtctggagttcaagaccagcctggccaacatggtaaaaccccatctctactaaaaatacaaaaactagctgggcgtgatggcaggcacctgtaatcccagctacctgggaggctgaggcaggagaatcgcttgagcccttgaggcagaggttgcaatgagccgagatcacgctactgcactccagcctgggcaagaagaatgagactccgtctcaaaaaaaaagaaagaaagaaagaaagaaaaaaaattcngctccaggcagacttctttttntgnttctgcctttaaaaaaatctccttggcacagcttcacntgattggatgggagaggaaatttgaggctgggagacctcctanaccacagctgtaatctt

SEQ ID NO: 2407 - DNA, 309 bp, Homo sapiens
aaggcacagtcttcttctgagatttggagagcagagggcaagtgggcagcgtgacaatggtaggaaaaggcttgccccagagtgaagaagagaagaaaattgactggtaaaatgaactacaaatgtgaagaaagtgtaaaggacccaattgagaaatgaggtctatgttgcccaggctgcttgtgaactcctggcctcaagcgatcctcctgcctcaaactcccaaagtgctggaattacaggtatgagccatcatatttggctaattttacctcctttttaaataaagctgactactactacaaaaat

SEQ ID NO: 2408 - DNA, 188 bp, Homo sapiens
agactggatctcactacttgcctagctcttgaactcctggcctcaagcaatcctcctgcctcaacctcccaaagtgctgggattacaggagtgagccactatgccccacatggtattattattattgttattaatactacattgtgcttcataaataattgctaaatatacaagaatatgtttgtttc

SEQ ID NO: 2409 - DNA, 659 bp, Homo sapiens
  misc_feature 30, 58, 60, 181, 416, 475, 500, 507, 530, 590, 593, 603,611, 621, 624: n = A,T,C or G
ttaagtcagtaacttgtagaggaaaaaccntgatggggaatggtttgaagctccagcngnaccctaaaggaggagccagggcaccagccggatggaggaaaatctcctggcccaagaaagtgacaggggaaagactccttcttcccttgctcacacaggctcccaaacatcacttcccagnggaaaacaaagtgcccatctccccacaaaggacttgtgaagctcttggaagcaccaagcaagaagactttgtcaagtttcttgttccttgggattgttcacccaagccacattggggccaagccaaaaatccttgaagaagcttgggcttgcaaagtcaagaactctttctttaccttgaaccccaagggaagttggaacccggggggccaccaagaagccttgatttcccaagnaagaagttcttccttcttaaaaaaccaaaagggcaattgggggaccccccacttttttnttcaacccgggccattggtcttggnccatttnttaccaagtttggaagggccacnttaaaatttcaattgcctttgaaacccgggccccttggggttttcaaaaacccctcaacnttnttggcccacntttttttngggcttggangtnggacccctaaaaaacccaaagtttattaagccatt

SEQ ID NO: 2410 - DNA, 465 bp, Homo sapiens
  misc_feature 22, 375, 376, 377, 378, 379, 380, 381, 382, 385, 386, 387,388, 389, 390, 391, 392, 393, 394, 396, 402, 412, 416, 417,418, 419, 420, 423, 427, 429, 436, 437, 438: n = A,T,C or G
ctggcgatctcctgaattgagnccaactgagggacctcccacctgaacaggacgattgaactttgctttgcgatgacacaagcgacatcttggaagaggcaaaacttgagacaggtcttcaaggattggtgccatctggacaggttgaagaggagtaggagggctttcggatgtggagaatggcatgcacaaaagcacggagcaacactttatgccagttggattatggtccattgggagaaagatcaattaaggtgaaaccccagtagagaaagcactggagaacaacattcattcttccttaataaatcttagttttaaatatttgctttgagttttgttccattaataaagaaaataagaaggaaaaccccnnnnnnnnaannnnnnnnnnanggggcnggggggcccntttnnnnnggntttnanccgggtnnntttttttaaaagggggggccccccccc

SEQ ID NO: 2411 - DNA, 124 bp, Homo sapiens
gccaagatgacaacgagcccagctgaagctgacatcccagcaaattgcatgacaaattgcaaagacgactaacccacaacctactcttctggaaaatacaatttaaataaaataattttaagtg

SEQ ID NO: 2412 - DNA, 440 bp, Homo sapiens
  misc_feature 358, 384, 398: n = A,T,C or G
gatggagtgcaagtggtgcgaccttggctcactgcaacctctgccttgcctccggagttcaagcgatcctcctgcctcggcctcccaagtagctgggattacaggcacccaccgccacacccagagagtgtgacgatccccctgatgcggctgagatgttctgaaatgaagacgttggctctcatccccagcctgaagagagaaaattctgagatggctcccttacagattgagagcagatacggggtttcaccgtgctagccaggatgatctcgatctactgacctcgtgatccgcccgcctcggcctcccaaagtgctgggattataggcgtgagccaccgcgcccggcgggttgngggttaatattaaggcacttgggtanggaacacagccaanaacgattgcaggatgggtccttccaggacacttgacgtctca

SEQ ID NO: 2413 - DNA, 463 bp, Homo sapiens
  misc_feature 43, 340, 379, 424: n = A,T,C or G
gtggccttttcaatccttccagctaccagtcagtccacaagcncttatgggacaccagaccttgcctggagcagccttggggaatcaaataggagccagtccctgccctccagaaactgtgtgtctgggggagaagatcacacacaggaaaatcaagtggtgacaagaggtgccatgagacagtatatagttcatttccccaccgcaagagtaaagggcttagggtcagaggctttggtgcctgagttctgactctgccaattattagcattgggacctcagactcagctggcagagaggagaagcagcgggacatcaggactatggctggacgtcaganaaaaacaacttaactttaaaaggtggcagttggatgggngtaacttaggagaagaatcttgactgggagacggccagacttcanaagaagatgacctacccccccatccccttttcagcttcc

SEQ ID NO: 2414 - DNA, 416 bp, Homo sapiens
  misc_feature 366, 402: n = A,T,C or G
gttcagagagcccatggtggttcgggggaagcatcagtgttgtctacaagaatatggagcccactccaaatgaaataatcagataacattgaaaaagaggaaatccgcacaacgtccagctatggagtagctacatggtgaaatgccgggaagatgtccaggacaggatgtggtgacactgtgggaaggctttattgcagaagggaattctaagaagtgtgggagaaccatgaaatttagcccagaagagtaagaaacattgtgccaggattggaaaggaacagctctgacaaggaaacaagaataggagaaaaatgccagtgcagatagagggaggtgctaattgctcttagccaaaaacattanaaggatttgtcaaaaggagtcttacgttaaatatanaaagtctgcttctc

SEQ ID NO: 2415 - DNA, 371 bp, Homo sapiens
tagagacgaagtttcaccgtgttagccaggatggtctcgatctcctgacctcgtgatccaccccactcggcctctcaaagtgctgggattacaggcgtgagccatcgcacccggccaaggtgacaaaatatttcttgctgttagttgcaggagagagaaaagatgaatactgatccacgtctgagagagagacaaaaattcaagttggagaatggtccagatacatcaccaaagcaaggaggactgtaagtggatatcaagaacctgagtgcagagacaagagacagatctctgtttctgaaaacatggcaaggaaaataacctaaatatcctctcactatcaagcattaaaaatggtggattaaattttg

SEQ ID NO: 2416 - DNA, 373 bp, Homo sapiens
ctgccctgtgtttgacatttggtgattgtattcctttcctgggacagccgtaacaaaacgccacaaactcagcagcttcaaacaaccaaaatggattctctcacagctctggaggccagaaggccaacactcaaggtgtactgggaccgtgctccctctgaagcccccagggaagaatgacttccttgcccctgccagctcctggtggtggccggcggtcctgctcgctccttggcttgtagacacatctctcccatctctgcctccaccaccgcgtggccttctctgtgtgtctgtgtccagatttccctcatataagggcatcaagtcattggactggggccatcctcatacaacatgctggttagccttg

SEQ ID NO: 2417 - DNA, 441 bp, Homo sapiens
  misc_feature 360, 393, 397, 401, 405, 411, 418, 423, 428: n = A,T,C or G
cttcactccttagcccagcgagaccacgagcccaccgggaggaatgaacaactccagacgcgctgccttaagagctgtaacactcaccgcgaaggtctgcagcttcactcctgagccagcaagaccacgaacccaccagaaggaagaaactccgaacgcatctgaacatcagaaggggcagactccagacgcgccaccttaacagctgtaacactcaccgcgagggtccgcggcttcattcttgaagtcagtgagaccaagaacccaccaattccggacacacctggatctctttttccagtatcactatcagttaaatcccgcctcccccccccccgaaatttataatttttttaaccnggcacccttggagatttatttaggaaaactagngacnctgntttntttganaacagantaaanagcgngggtggaactttt

SEQ ID NO: 2418 - DNA, 341 bp, Homo sapiens
agatgaggccttggagcagggatgctggccacccatggagaaaaatgagacctgtgttccaggctgtcagcagagtcccggaggctttgcccatggctgtggttcaaactgtgttccacaaatacttgcaactgtctgcagggcctcggagacatgggccaaatgggtttccctcccgaatacccaggcatgacacaacttcagctttcatctaattatacactggacatccacaccgtttcacctgcaaagggttctactgttaaaataaataaacaaaataaaccctctcttttataatatgtgaactttaaattaaaataaaaaaacagattagcaac

SEQ ID NO: 2419 - DNA, 639 bp, Homo sapiens
  misc_feature 443, 548, 574, 579, 617: n = A,T,C or G
gtcctcctaaatgtcttcccagccccttcgagagaattgtggaagtggggttgccagatcaaacacaagacacccagttaaaattcaactgtagggtttcgctttgccatgcaggctggagggcagtggtgcaaacagggctcacaggcagaggctgctctgcctcctaggatcaagggatccccccaccgcagcctcctgagtaactgggattacaggcacaagccatcatgcccaggcaaggattcagggacatctcagagccgctggggtctcgtcgccttcaggtcgtctgggctgggaggtctcctccctcttcctccaggcaccagtgggagcaggcagtcacaccttcctgtgagtgagaaccatagcagaaccttcaaagcacctctcaagtcgggctggagtgcaatggcgtgatctcggctcaccgcaacctncgcttccgggtcctggttcaagcagttctcctgctcaacctcctgagtagctgggattacaggcacatgccaccacgctcaactaatttttgtatttttagtaanagatgggggttcaccatgttggccangctgntttcaaaactcctgacctcgtgatccgcctgcttcggncttccaaaatactgggattaca

SEQ ID NO: 2420 - DNA, 322 bp, Homo sapiens
ggaaggatgcgattggtcagcatgaatcatctgcccacccctatcgtgcgtatggactgtgattgacagttacgtgcaccacatgaagaaaaaagcagagttcttcaaacagcatgatactgtaagagaaggaatgggggacaagatctagggctgcaggattaaaaaaacaaccaaaccaaacagctgctactcttcatacgcgtcattattcctttccctttattttgtgaaatatttaagtatttttataaattgtgatattagctgcttaaagtattgtaaataaaattaaatattgtaattaaagatgtatatatat

SEQ ID NO: 2421 - DNA, 307 bp, Homo sapiens
ctgtcatttgccctctctgatgaggtcagttaccatgttgtggctatcctgtgaagaagaccagatgaaaaggaactgagagatgcctctgaccaacagcagaggaggaaatgaatctggaaacaaccatgtgaataaatctgagaatgaatgcaaccctagctgaaccttaaagtaccatctgacaccttcattacagccttgtgatagactgagagccagaggacccagatgaaccacactgggtacctgacccacagaagctacaagataaatggttgctgcgataataaatggttattgcttt

SEQ ID NO: 2422 - DNA, 410 bp, Homo sapiens
  misc_feature 16, 29, 33, 37, 48, 56, 60, 275, 349, 380: n = A,T,C or G
gggactcctcttagtnagacttgattctncganctgngataaaatcanaagtggantagntggaaaaaaacatgccaccttcttgctgacattttgtttaactctcttggccaagctgattcctccttcctccatactcccaaggcacctgaggtctggctcttcaggctgtgtgacgacagggactttaaagaggcaatgaaggtaaaatgaggtcatcaggatggactccgatataaccggtgtccttacaagaagagaagacaggacacgcncacaaagcgagggtcagccatgtgaggacagtgagaaggcggccgtcacaccccaaggagagaggcctgggaanaaaccaaccttacaccttgacatcaaacttntggtctccaaaactgtaggaaaataaattt

SEQ ID NO: 2423 - DNA, 668 bp, Homo sapiens
  misc_feature 603, 638, 640: n = A,T,C or G
atggagtcttcctctgtcatccaggctggattgcagtggcaggatctcggcttactacaacctccgcctcccgagttcgagtgattctcctgcctcagtctctggagtagctgggaatacaggcacccaccttcgtgcccagctaattttttgtttgtatttttgtagagaccgggtttcaccatgttggccactctggtcttgaactcctgacctcaggtgatccgcccacctctgcctcccaaagtgctgggatgacaggcttcagccaccgtgcccagccaagatcaagttgttgttggcagggctgcactccctgcaaaggctgtaggagacaacccatctttgcttcttccagcttctaggggcttccgcagcatgccttggcgtgccttggcttgtggctgcattactccaatctctgcctgtatggcaaattacctcctcctggtccatctatctccctgtgtgtcacttataaggacagttatcattggatttaagtgccctcctggatgatccaggatgatctcatctcaagatccttaacttaagtacaccacaaaagtcccttttgccaaatgaaataacattcaccatttncgaggataaaggacttggatacatctttttgggangncaccattcaacacactacactaataaaa

SEQ ID NO: 2424 - DNA, 484 bp, Homo sapiens
  misc_feature 410, 424: n = A,T,C or G
atggagtctcaccctgccacccaggctggagtacagtggtgcgatcttgcctcactgcaacctccacctcctgagtacaagtgattctcctgcctcagcctcctgaatggctgggactacagagctgaagtctgcctttgttactcaggagtctggaactcctggagttgaaactcctagcctcaagcaatcctcctgcctcggcctcctgaagtattgaaatgagatctctctaagtgcctcaggctggacacaaactcctgggctcaagtgatccttctgcctcagcctccctagtagttgggactacagagaatttccctaggtcaaatggcacccagaaactgcctcctctaccttgaaagctacactgtcttaaccttgaccaatggctgactgatgtgggaatncaaaagtcctcctncttgtctcaaggatggagccttgctctgtcactcaagctggaacgcaatcgcgcgatagg

SEQ ID NO: 2425 - DNA, 379 bp, Homo sapiens
  misc_feature 109, 158, 223: n = A,T,C or G
gcagcaaattccaacaagagagaagtatcactggatggcaaacggagagtggggtcccagcctcactctgagggcaggctgaacaccttagggaccatcaacccccggnggtgtcgtttccagtgaaaaccgaactccgggatgtagccggattgganagaagcgagtggcgcgtgcgcccccttcctgcggcggatggatgaacgtttcctccaaacctctnaagagcccgtgggattttaccctttcacctgcctccgcttctgctgtatcttgtcccagttcgttaagtgtgaaggtctcagcagccacacctcgacagcataccgggaactctcaatactcctctacccattagcaataaacaatccaaaaattc

SEQ ID NO: 2426 - DNA, 62 bp, Homo sapiens
gctggagtaaaagggacattgggaagattagttggaatttgaacaaaaagctccatttagca

SEQ ID NO: 2427 - DNA, 418 bp, Homo sapiens
atcaaaagcagcatggatctgcctgtggatgagtggaaatcatatctgcttcaaaagtgggcttcactcccgacgtctgttcaggtcacaatttctacagcagagaccttgagggatatctttcttcactcctcttcacttcttcaacagagtttcgctcttgtcacccagcctggagtgcaatagtgccgtcttggctcacagcagcctccgcctcctgggttgaagcaattctcctgcctcacctcctgagtagctgggattacaggcatgcaccaccgcgcccagctaattttgtatttttagtagagacgggacttctccatattggtcaggctggtctcaaactcctaacctcatgtgatccaccctcctcggcctcccaaagtgctgggatgacaggcgagttaagcgcctg

SEQ ID NO: 2428 - DNA, 83 bp, Homo sapiens
  misc_feature 4, 10, 13, 17, 25, 36, 38, 48: n = A,T,C or G
gtgncggtgnagntggncctgcagngccgatccttncnccctagtccngatgccctgggaacctcttttcataatctgcacct

SEQ ID NO: 2429 - DNA, 369 bp, Homo sapiens
  misc_feature 60, 63, 77, 89, 108, 138, 142, 160, 163, 168, 176, 214, 257,263, 305, 306, 333, 338, 340, 342: n = A,T,C or G
ggtttgcatcgccagcttctatatattaccggccctttttttttgctgggatattatctntgnaaaaacgggggaanactacccttgtntgctggggaggggacccgnggaaatggtttgggatatatgaaaattacntccnggagggattttcctgaanaanataanaaaacctntgggggaaatttttgaaaaaattccatccaataccgtngaaagtcttcaaaaatgcttgctccaagtttcacttgataccngcttgnttcttgaaatttgaaaggggacattgtttttttatgacaagnnggaaagcttatgctaaatcctgggatnggggngncncctttgtaattaaaaaaataccccccc

SEQ ID NO: 2430 - DNA, 475 bp, Homo sapiens
  misc_feature 256, 418, 439, 460: n = A,T,C or G
gtaattttggaaattacagaaacatgtaaagaaaaagagaaaaatacagctgtgtcataacctcattgctggaggcagtcgctgttaacatcttgtggcgaacactgagcttcatggctgactcttcacaatttgatggggatcttgctatgttgcccaggctgaccttgaactcctgacctcaagctgccctcttgcctcagcctcccgagttgctgggattacaggtgtgagctgctgcacctggccgatttanttttctgtatgagatttggtactctgaatatttctttcatccaggagagagttattgcttctatgtgcagatcttatttgcatttgggatcacggactggaaagggctcaggggtttatatcattgcaccgatttacaaaaagtgttgacagcggggaggangatctgaaatcagggccttcncgaggaggctggctgaccctnatttcctgctggctt

SEQ ID NO: 2431 - DNA, 486 bp, Homo sapiens
  misc_feature 114, 262, 277, 423, 424, 425, 438, 443, 455, 473: n = A,T,C or G
gagagagggatctcattatgactgagaaaaaaatatcaaggaagagttgcaacatgtcatttgcctccctctggcctcattgttattttctcattctctcctcccatattttgnaagagtgcattgatttattgccattttcattttttaaaacatcttcctcctacctcaacaagcatttttgcccaaagcgagtattaacaacttccccccagttctccttgtgttcctctgtcgagtgttcttattcattccatttgtnaaaaaaggaattctntgggccagcacaaagcatctgctgcttctatccaggcaaagaaagatggtggcatggggtttttatttactgaaggctgggacgaacgcagagctaagtgtgcattcctggtgctcctggctttgtaggtgatacaaaagctggtnnncctggcaagaaanaaaancccttccagaangcaaaatcaatgccggcnccccacttcacca

SEQ ID NO: 2432 - DNA, 506 bp, Homo sapiens
  misc_feature 381, 383, 401, 418, 426, 469, 476, 481, 491: n = A,T,C or G
atagagtcttgctctgtgacccaggcttgtgtgcagcggtacgatattggctcactgcaacctccacctcccaggttcaagcaattctcctgcctcagcctcccaagtagctgggattacagatgaggtctccaagggaccagatggagaacagatgcaaccacactgaagtcagaatcgcagcttgcctccgacacctgacgcttcactgttggcgaggcccactatgcctcgctctccccctggaatgagttctatcccagaggctcctataccctttagaaataaactgctcaggcagcccaaccagttcatccaagaggcctggaaccacagcagcgtcgacagctgagatgagagttggtccctgatcttatacanancccgggtttaagtttganttctttcttttccttgncaagaacntttaaaaaaaaactttttgggggccggggcattttcctggttnttttccnaaccnaaaaaaagantttttttttaaaacc

SEQ ID NO: 2433 - DNA, 172 bp, Homo sapiens
  misc_feature 14, 17, 44, 45, 55, 65, 71, 90, 108, 116, 122, 130, 134: n = A,T,C or G
ctttcccacggggnggncttgccccttccctggtgggggctccnntgggggaaanaaaggggganccaatnaaaaaaaaatgcggggacntctcatgatgacctgggnccttggtntttttnaaataaancctntttttttaccttgttccaataaaaaagctgaacttttt

SEQ ID NO: 2434 - DNA, 592 bp, Homo sapiens
  misc_feature 20, 27, 68, 109, 110, 119, 142, 149, 204, 219, 251, 260,322, 327, 423, 454, 455, 459, 487, 492, 499, 510, 517, 524,545, 552, 579: n = A,T,C or G
agaactggaggcagtggcantcattanggctgtctttggtgccttaaacaagtatttggatcaaggtntttgtaaataagaagattttttggatggatgaagaaagatnnctttattcnagcacccaaaaaagccaaaagcnttttaantgcccatattattgtccccaaagaaaattggtataccagggaccctgggcttaancttatttcatttgcnatggcagggtaccattaaaagaaaacaattangatgcccgnacccaaaaatgccaattaccctgggaaggaaccagaccattagaggttgggaaaaattattntgggntattggggaaaggggtatttcccaacaaaaaaaaggaccattgggattgaaaaaggaccggaacgactttctttggaaccaagaaaaaacccccanggaaaaaggtcaaaaaaaaaaaggaaagccnnccanagaatggattttcttggaatggaaatantggantgggaangaaccgacttnttgcaangccctcnaactttttatttttcaacccnccaaggncttggtttcaaaccctttcaagggaanggggttttcaaaa

SEQ ID NO: 2435 - DNA, 405 bp, Homo sapiens
  misc_feature 211, 215, 223, 226, 231, 235, 238, 241, 254, 281, 284, 286,291, 293, 303, 305, 316, 317, 326, 329, 331, 334, 336, 342,365, 378, 390: n = A,T,C or G
tttgctctgtcgcctaggatggagtgcaagtgcagtggcgcgatcctgcaacctccgcctctcgagttcaagcgattctcctgcctcagcctcccgagtagctgggattacagacgcgcgccaccccacccagatgatctttttaaatgcaaaatgccatcgacgcaaaaaatcaaagaatcagcttaagttccagaaaaaagaaaaaccnaccnaatgaacnatnagacnaccnccnccnccaccaaaaaagncttttggggattttgggaaatatttgngtntnattcntntactttaccngngagaaaagagnntttttttanaantnggncntccaanatggagatttaaaattcatttanggcttttggaaanggttcttaaaanaaatggatttggggg

SEQ ID NO: 2436 - DNA, 147 bp, Homo sapiens
  misc_feature 116: n = A,T,C or G
atgtcctacaacaaatggtagaaagagaaggcatcacaacagagaggttgcatgagcgggtttcccacatctattatttcattttatcattgtaactgtgactttcaaaagaatgngagggcataattaaacatttactcacgaacc

SEQ ID NO: 2437 - DNA, 224 bp, Homo sapiens
atggccaccagagctgcactggagagtgcatcttctgcttccatgtgtgggaagatcactgtgttctctgtgacccagtagtgtgaattgcttatctgtttctgcattaactcaaatttatcagtgattattgcctgaatacctcatgctttctgagatctacaggtacagatttagggttgaactctttctctaaataaatttaatccatgtgtgttaaaaag

SEQ ID NO: 2438 - DNA, 471 bp, Homo sapiens
  misc_feature 381, 398, 404, 412, 419, 434: n = A,T,C or G
agccaataaattttcttggggctcacatgttttcataggcccctgaaaagcccggaggccctgggtactgtgcctttagtgccacgtggaaagaacagcttgggctcaggacttcaggtggtctccacccggccactggagagaatgagacaaaaaagccccagatgaggagactcaagaagctatgaaaggtgaaggcatttgctcagagtcacacagctactgaggagcaaaccaaggatttaacccttcatccctttagctttgaggatctttcagctgcccagtgcccgtgaagatgaataaatattaactattactattatcattatcagaatcttcctctccctgaaggaattaaagaaaaaaaaaagcctcctnattctacccggttactnactggngaacccangggaaanggacttaatctggcngggcctcagtttgtcacctataaaagggggatatagg

SEQ ID NO: 2439 - DNA, 341 bp, Homo sapiens
  misc_feature 19, 81, 87, 94, 124, 138, 143, 149, 159, 178, 186, 235, 248,281, 299: n = A,T,C or G
aagcctgtctttgctcggngcttatcatctctggaaagggaatggaagaaaaattcaagcctagccaaaaaaagctggaangggggncccccanaaagttccaagtttggatgggtggataaanaaaatcatttcctnggganggacanttccgggaanggcactcttacgctttccnaaaatcantctcttacccctcaaagggcttttatgcttgcttaaaggcaagggccanccccccgagtttnggctggggacctcttaaatttattgggggggcnctcccccttgaatggtgnggaaaaagggggggggccttcccttcatttaaaaaaggtggt

SEQ ID NO: 2440 - DNA, 469 bp, Homo sapiens
  misc_feature 73, 389, 404, 417, 421, 431, 444: n = A,T,C or G
attcattcgcaagagactgggttattataaagcaaggttgctcctcctcgttggtctctctgcacgcatgaanaaaagggcggccctttcttcattatgttctgatccgacacatggccttgaccagaagccaagcagatgctggcaccatgcctcttgtacttcccagcatgcagaaccctgagagacagtgtttcaccatgttgtccaggcttgtctcaaactcctgggctcaagtgatcttcccacctcagcctgacaaagtattgggattacaggcgtgagccaccatgcctgacctaaaacattttcatcacctcaaaaatatcttttatgctctttccaagttaatcaagcttctcacccccaccccaaatccaggcagctgntgggctgctttctgncactataaataanaagnggattttaanagctcacataaanggaaccatacagaatataatctttg

SEQ ID NO: 2441 - DNA, 285 bp, Homo sapiens
  misc_feature 26, 215: n = A,T,C or G
cacaaagattgagaaaatgctgttgncccccaagaaaagagatttttcagcaagatgtggggaagaccagtaatgaaagggttgtgagatcttgaatttgcaagtaatagactgcctcctggaccttccccattgagatctgtcctctgatatgagtgaggaatctttttgtccatatcttgagcattttaaacaaaagttaagcttcactttanattaaactgcatctccaaactttctttgaaaactaatgctgttagaaataaaagacaagtttgtatatgt

SEQ ID NO: 2442 - DNA, 438 bp, Homo sapiens
  misc_feature 14, 21, 31, 50, 60, 74, 101, 127, 131, 139, 145, 161, 332,337, 360, 365, 374, 383, 395, 401, 416, 421: n = A,T,C or G
tttcagggggggancgacggnattcatcttnaatcaacagtacttttganaagcttcgancgggatcaattccnccccccccctaacgttactggcccaanccgcttggaataaagcccgggggcgnttgnctatatgntatttnccaccatattgccctnttttggcaatgggagggcccggaaacctggccctgtctttttgacgaacattcctaagggtcttttccctctcgccaaaggaatgccaggtctggtgaatgtcctgaaagaaacagttcctttgggaaactttttgaaaacaaacaaacgttttgtaacgaccctttgcangcagnggaaccccccaacttggcgaaanggtgnccttttggnggccaaaanccccgttgtatnaaaaancccctggaaaagggnggganaaaccccaagggccccc

SEQ ID NO: 2443 - DNA, 172 bp, Homo sapiens
  misc_feature 33, 138, 156: n = A,T,C or G
aaacttataagggggatacttatataaacacantggccacatttccaaatcttcttttcaatcccagctggtggattaaacattttttgggaaagtaacctcctattataaaattaaaagccaatattaagagttttncacaatcaagaatggtcnataaaatttttaactt

SEQ ID NO: 2444 - DNA, 191 bp, Homo sapiens
  misc_feature 33, 47, 85, 97, 119, 125, 128: n = A,T,C or G
atgctgcacttaaaaggatgcttgttttgatgncctgctcattgttntccctatgaagtatcaagtaatccatcctagagggggngttctttttaanaatttgagaaggaaaacgtacntcccanctncttttatataatgcgagcaaacaaaatatttgttacaacacttcattcaaatttatttaatat

SEQ ID NO: 2445 - DNA, 516 bp, Homo sapiens
  misc_feature 104, 126, 158, 164, 183, 198, 200, 203, 264, 303, 329, 333,407, 415, 427, 444, 451, 453, 463, 465, 470, 482, 492, 495: n = A,T,C or G
tggctcacacctgtaatcccagtgctttgggaggccgaggcagatggatcacttgaggccaggagttccagaccagcctggccaacacggcgaaaccccatctntactaaaaatacaaaaaattanccaggcctggtggagcacgcttgtaatcccangtactngggaggctaaggcaggagnatcacttgaacccangngangctgcagtgatctgagatcgtgccactgcactccagcttgggcaacagaacacagactccntcttaaaaagaagaaagaaagaacttctattttttaaangttttttcctttcattgaactccatntatngcctttccattcaaagcataaagattaaattttaaaacaaggcttggccccctggcttatgcctgtaatcccancacttttntgaggccaaggngggcgggatcacctganctcaaangnttagaatccntnctggntaacattggggnaacccccttnctntaagaagaaccccatttttta

SEQ ID NO: 2446 - DNA, 503 bp, Homo sapiens
  misc_feature 97, 279, 397, 474, 490: n = A,T,C or G
gtggaagatgcaatgctgatgtttgataaaactaccaacaggcacagagggagagtagcgatttacgaagagcaaatggaagcgaaaaccccttttnttctttgggccggctgtgtattgctggggcacttgggcagacccccaaagacatccttaaagacaagagaaatcgggggctgtgtgaagatgtcacatctgcagatagggttcgaggtagagcggccttttgggttttctcctcatttggagaaattgagaagtagcacggaagacctccanacccagagcttgtgtacggcacagtccttgaaggatttgctcccattctcagggagcaagacccatcttaaacgtggaaacaaatacagcagagtaatacatacttgaggcttaatgnaaagttaattcctcttggcacagccccagatatcttgaataaatggtctgcgaagtgctgaaatatcttgataatgnccgttttacttttgantatataatcaatt

SEQ ID NO: 2447 - DNA, 472 bp, Homo sapiens
  misc_feature 20, 23, 28, 43, 50, 52, 64, 92, 366, 368, 418, 450, 455: n = A,T,C or G
gaccctggggagctcctgcnttnaggancacctgaggtctaantaaagcnanggaacatgctgngagccaaccaaggacagcctgactccanaagatacattcttccgaaataagacataaagccttttgtccagtagcacgatcgaggctactctgcatacagatggagtttcactcttgttgcccaggctggagtgcaatggtgccatcttgactcactgcaacctccacctcccaggttcaacggattctcctgcctcagcctcccaagtagctgggattacagagatacgattttgccatgttgcccaggctggtcttgaactctgcgctcaagcgatccacctgcctcgacctcccaaagngntgggattacagacatgagcccctgcgcctggccagcttcacgcatattgntataatcttcatggacaaatcgaaactcaaanggagntttgctcttgttgccca

SEQ ID NO: 2448 - DNA, 476 bp, Homo sapiens
atggagtgtctctctgtcacccaggctgcagtgcagtggcacgatcacagctcactgcaacctccacctcctgtcctgggttcaagcgagtctcctgcctcagcctctggagtagctgggactacaggaggagcaagtgccattctgcctcaagaccctaacccaggcatctgaatctctcctgagtggtctcccttcattccttttcagctccacttggcctagtgaactccgactcattctgcaagtcccagtacaccttctttaacagtctgcatgaggcagactctcacagttcactctatatttcttccatgacactcttcccaaatgtaactaaaggattacttgtataatttttcctttagcatttgtttttcaaactagactgcagctcactggaagcaggtcactgaaatttagaaggcccaaccaacatcttttaaatgaaatcaataaagcaaagatggcacaag

SEQ ID NO: 2449 - DNA, 353 bp, Homo sapiens
gtccataaaagccctgggctcggccacagcagggcaaagaccagaggacagagagaggaaggggataactacctgcagagaggagctatcctctttgctgagagcttcagaggcctgcagagacatctgaacaacctgcctacaaagaggagccaccctcttcagagcctcctctctgctgagaacagcagacagcaggatgaccagtgggcagagaagagctaccccctccagggcctcctctttgctgacagctgaacactccatgggatgacctgcctacagagaggagctacccacttccggtctcttctgagccattctaacactaaataaaattcttcttcatcttc

SEQ ID NO: 2450 - DNA, 326 bp, Homo sapiens
ggtttgactccctagaacacttctatcaaacaaagccgaaacggggaggacagagagatatttacacgaagtttcaccaccttgcccaggatggttttcaactcctgagctcaagcaattcgccaacctcagcctctcaaagtggtgggattacaggcaggagccaccaagcctggccttacgtacatcttttgactctccaaaaacttaactactaatacccttctgctgaccagaagccttagtagtaacataaacagtcgattaacacatattttgtatgtttcatgtattatatactgtattcttacaataaaataagctag

SEQ ID NO: 2451 - DNA, 140 bp, Homo sapiens
gtccctgcacctgtcacaccacaaacaatgataaaaacggagacacctgggtgagcctcactcactgcgcatgcctccatcttcgaagagctcctgttcactgtactctgaaatagactgtgcaaaacattaaaactgac

SEQ ID NO: 2452 - DNA, 245 bp, Homo sapiens
actccattggcaacggagcagcagaggagagaagagaagcatctgaacgttgagaggagaagcagcagctggacattggagactacagtcggagaggagttcaaccagagatagttggagagaagtttggtcagacagccgaactccagggaaataccaccttctcgctccatccccttcccagtcccccctcccactggaagccacttttatcagcaataaaatcctccgcgttcaacaccctc

SEQ ID NO: 2453 - DNA, 373 bp, Homo sapiens
  misc_feature 305, 312, 314, 320, 325, 326, 328, 332, 336, 342, 351, 353: n = A,T,C or G
gagggcatcccaggagaaggcagagtccaggaggcggatgttgggaagcaaatcctgaactcatcaagtcccatagcccctttgtctatggaccttctgccagcatcttctgtaagactattaaaatgcaccaacccaaggtctccagtgctgctgagtcccccgtgtcacctcctgcaactgccacagttgtcaacagctcaaatcctagagaccttcttcattaggtcaatgagtatctaaactttaaaaaataaataaaggggtaattattagcttgccccccatcccaacaaaaaaaaaanggccagngnggccanttcanntngaanttanccaggntgaacttgntnaaaagggggggactacccaa

SEQ ID NO: 2454 - DNA, 412 bp, Homo sapiens
gagatgccccagtactttaatatgtaccaacaattggctatgttatggaatctgcaatgtggcctccgctgctgacctctgaaacacaattcccagtctgactacggaaactgttcagtttgatcctttcaacttatttgaatcctgacaaataagctcacagctgaaaggtcaacatagtcgtatttcatcctccagagctgttcttaagacatctgcacaacaaagcacttcttatagcacctgacatgggccctcaatggcactgtacctcattaaaaatgtcccctgcatgcgcacgcattccaaggcacatggtctggtgatggtttaccaaataagtgtttacagaagggttagtaaacaaggcagattgtcaacttttccaataaagcgtcactatagtgctgaa

SEQ ID NO: 2455 - DNA, 248 bp, Homo sapiens
agacggggtttcaccatattggttaagctggtctgaagctcctgacctcaaatgatccgcctcggcctcccaaagtgctggaattacaggcttgagccaccatgcccagccaaccctatagctttgctccacctgggaggagctggaggacaaaggacttcacagaagaatggagtcccaaagaaacagcttcaggaactgaggagagccagaaatttaatgtatttagggctcccttgtgaaaacac

SEQ ID NO: 2456 - DNA, 455 bp, Homo sapiens
tgactgaaacgctgaaccaagcttggagctggagcagccattttgggccacgaggtagaagccatgtgttgaagagaatggaacaagatggaagaaacctggtgatcagggagccgccataacagtcttgggttgtctctgtttacatgagagatgaggaaactgaggctcagagaggttaaatatcttcctcaagaattttcgccagagctgggatttgaaccaaggtctgcttgacttagaaggcagtggtccttgctttctcccgaggagaagggagcagagatacctaaagatgcctgactcccaatcccatgggaacatgccccctgcgggctcacttcctctcctctttgtcttcaatttctaagaatgtcttcttttcactaaaacaaaacactccagaatgcattctgcatgaataaagactgccaactccatggcagaaataacat

SEQ ID NO: 2457 - DNA, 443 bp, Homo sapiens
  misc_feature 386, 388, 389, 394, 395, 397, 400, 401, 402, 403, 405, 408,412, 414, 415, 416, 424, 427, 430: n = A,T,C or G
gtaattcatgcagctcctgagacaagattctaaccatgatgaagttggaaccggagacttctacgagaggatgagtcaaaactcagtaagaaaggcagtcctggctccctgccatgcttctctcccctaccctgctcacaagggctgatgtgtggctctccaaccatcactccattgctcctcaagtggacagtggaaggacaaatgtatttcagccccaaagcacaaatcacctgattcaaccctcatgggtgacctagtcaagtggccacctctgggccctacatcagcctgcccttccttttatcataccacctgtctaactgtattataaggatctttttccatgactaaatttttttttgaaaacaaaaaaaaaaaagggncnnggggnncnttnnnntnggncttnannngggggaanttnttnaaaaggggggggg

SEQ ID NO: 2458 - DNA, 397 bp, Homo sapiens
gagaacctccggtgctgaagaatagagagctgcccgccccgcctgggagaaaccttcagatgcgcccccgttgttcccccgccgacagaggcttgatgccgcttcaagtgcccgcagttatttttgtcagccatcctctcctcccactcctcccaaagaaagcattcagtgagtcatcgggagacccggagacatctgacggttgctcagctggtatccggccactgaggggaaggaggagtgtgttgatgtccccttggactctccttgaagaaactgcatagattcacagactcctggaaaatcagaatccagaatgtgcacatgatacacgtttggtgtgtgtgtttatttgtattcactcacggattcaacaaatatttgttgattacctgcc

SEQ ID NO: 2459 - DNA, 554 bp, Homo sapiens
  misc_feature 20, 200, 420, 438, 448, 459, 463, 487, 495, 501, 520, 530,541: n = A,T,C or G
gaggaactgacgagccttcntctaccacataaaaattgcagcaaaccctgcagctatcctgaagctgccatgctgaaaaggccaattgggagaccacatagagaccgagagagacttccaaggactccagccaatcctgggccccagcagtttgaatctcccagcaatgccaccatacaggagagggagcaaatactcanaagattcaagtgccagctgcatgggttgatacctacataaaaggcattggcattattcacaagagccaagatatggaaataacctgtgtccattgacagacgaatagatgagggaaacgtggcatatacacacagtggaatattattcggacttaaaaaaagaaggaaatcctgaatcctgctatttctgacaacatgagactgcaggacgttatggaantggcccatcatgctcttntaaaactttncatccctcagncaanaagggggagcctatttaccctggnccttgaantggaanaaggacttttgccctggcnttgtttttancatccccttgntgaaaaaaaaacc

SEQ ID NO: 2460 - DNA, 131 bp, Homo sapiens
atttttcttggattttatttccctttcaatggcctactctcagtgttggtgtctgagcttcctctgtgtggaacagaagatttttaaacctgtatatttatagcaaacaatgaatctctaaatagttctcc

SEQ ID NO: 2461 - DNA, 305 bp, Homo sapiens
gctgtgatgaacagaaagaggccttggagagccgtgggactcaggagctggagccaggcttgagacggggtccagaaggagcaagatgggatgcctttggactgagaccttaaattccacccagtttattacaaccatgctcactcctctacctgccctgccccaatcggtgcaaactgccttctccagtcttgcttcctctctaatccataggttgtctctgttttaagaaggcaagtggccagtgagagccttaaactaccttagtgttctctaaataagatatgcctccatggagttgtaag

SEQ ID NO: 2462 - DNA, 601 bp, Homo sapiens
  misc_feature 491, 503, 542: n = A,T,C or G
gtgattgcaaatctatggatgagaccaagggagaattttcacgccatcatagcattttattcctcacctgactgggaacagctcgaagggaaggacatgtctccaaagacatgaggagtattcaacgtggcattcgaggcgcaaggaaaaacctgcctatcccaagatctcagccccatcagccagccaagggatccacaatgacccttatgaagtttcataaggaagctaattgcttaaatgagatttgagtcaagaaggatgacctagcaataacctctatatatctcattatgccaatacttaaatggctacataagaggacagtccagtgacagacatggaaagaggcttagaggtcatctcattcatcacaccattttacagaggaaagcaaaatgccatccagagaaggaaagtcacaaagccatctaaccccagacctgggagtagcagctgatcacagcgggtcggacacaagaagctgcttncaaaaatctttnctttcatttggctacagagaagacatcagaaaacaaaantttataacatggctctagctctaactcactattcactaaagggccaaattaatagggga

SEQ ID NO: 2463 - DNA, 161 bp, Homo sapiens
agacgtgagtcttgctgtgttgcccgggctggctttgcctctggaactcaagcgatcctcccacctcagcctctcgaggagctgggactacaggcgtgcaccatcatttcctcctaaaattgtatgtgctgcatatataaaatgataaatgctttacatat

SEQ ID NO: 2464 - DNA, 315 bp, Homo sapiens
cttctccagactctgagttagaagcaaatgaagattggtggcaagagcacccactcctcctgcaagtcgcccagcagtgaagtaggaggcttggacacagggagagataaatgtgggttcttctaagacagatgcaggatccagcttattccttgaagtttccagtgttctgcactctactacttgacatccatctttccttcatgaccccctgctctataacttcaggctcagcaccaaacagaataaacagttgaattaagtatggctactacataaggtcagatctctataataaattctttactctacctc

SEQ ID NO: 2465 - DNA, 280 bp, Homo sapiens
aaccacaacatttggagattaccaacatggttttcagccctcagctttggcgaagacttcttccttttcattcttttctgggcaaatctaaacctttggagaagtagatgagtgaagtcaattgcaaagaagaggagtttgggacacagacttgtgtgaggacacagggagaagacagcgtctacaagccaaggagagaagactcaggaggaaccagccttgcccacaccttgatcttggacttccagcctccagagcataagagaataaatttctgttg

SEQ ID NO: 2466 - DNA, 587 bp, Homo sapiens
  misc_feature 341, 480, 500, 502, 539: n = A,T,C or G
ctgtagtgcagtggcacgatcttggctcactgcaacctccacctcccaggctcaagcaatcctcccactgcagcctccgagtagctgggactacaggcatgtgccaccatgctgggctaatgttcgtattttttgtaaagatggggtttcaccatattgcccaggctggtttcgaactctttgagatcaagtgatctgcctgcctcagcctcccaaagtgctggaattacagtgctctgaatgaagtggcaaagactgagggccttggggagcaagtcttcaactgccaaacagtcagtgaacagataaagaaccacagaaacagaggactggtcccagcnagcgtcagacccccagcaaggagccagtctgcactgacccactgaagaaatggctcccgggggcttgactttgtattttaaaaaaagtccgcaagtcaacctaaagactgtagctttcaaccactgatgtctcgggtgnacacttgacatttggaaaantnggctggtcatttcaccccacccatcatggtccctttnttttactgagggtccaaaacacaaaatcaccttagaatcatttggttt

SEQ ID NO: 2467 - DNA, 485 bp, Homo sapiens
  misc_feature 455: n = A,T,C or G
gagggccactggcctggaagaccagacagaaggctgcagaggctggtgccgctccacatccactcaggcccaagcctgacaccttggaggacacgctggagacacgtggaaagttgaccaggaacagagccaagtacttcccaggctccgtgggcatcaaagggattgcaccttttccagacccaatccacagctgcaggcagcaggcaggagtctgcactgacaaacgactcacctctgcacactgcttgattccagaacctgcgttctgacaccgatcacacctgccatcccctgccgggcccaacctcactcaggaatgcctgcgacccagcagcctgtcgtgggctgtgctgcgaatgccacacatgggccaggctcttcctcccgcaggcctttccagctgtcctctgcagcttccttgagctcgttctctttttctctgtgaggcatgnaagtgagatgcatgcacccaccttggtatt

SEQ ID NO: 2468 - DNA, 221 bp, Homo sapiens
ccgctaaatctgtgttgctgagcctgctgtttgcatgcaggaatgtgaaggactgctcaagttggagatacaaattgaagccagccccagttcaaaactgttacaaatggagtctgtaggcatgaggggctgactatataactcagagttctccagtactttactttaataaagaacacaatctttattaaaggataagtaataaaaatgtgttgatgtgc

SEQ ID NO: 2469 - DNA, 582 bp, Homo sapiens
  misc_feature 496: n = A,T,C or G
ctaatgcaagagatacaccaagctgagcaacaagaaaagatctactgaaagtctccttggctttaccaagaaagttgccgtggacccttaggtcacatagcctgaccatgctcagatgaaccaatggtgcaaccacaggaggaacctaagtgctcagctgagaagcagggactgaatcaagcagcagacacgatgataaagtttggatgtttgtcccctcaaaatctcatgttaaaatatgaccccaatgttgagagtggggtctaatgagggagtcctcccaagaatggcttagtgccctccaagaggaaatggctggtaataagtttacacgagattcggttgttaaaaagagcctagcaccccctcccttctcccctgctccctctcttgcatgtgacacacctgcttccccttgcttctaccatgagtaaaagcttcctgagatctcaccagaagccaagcagatgctggtgccatgcttgtcagcctgcanaactgtgagccaagtaagcctcttttctttataaattacccaatctcaggttttcatttatacaatgaaaaacaaacccatattac

SEQ ID NO: 2470 - DNA, 223 bp, Homo sapiens
gtggctctccctgtgtgggtacaagatgacccccggcgtgtcccagcacattcaggaggaacgttctgccgtctcagaatcccagcggggcacagcaggacagaaatgctttctcttttttaaaggacttaccattccgtattctgagcctcagtggcttatctcatgtcgtgagtcccattaagccagccacttggaccagctcaataaaatgctccaatgg

SEQ ID NO: 2471 - DNA, 536 bp, Homo sapiens
  misc_feature 465: n = A,T,C or G
gcctacagtcagctccaagcaacggcacagacacctcctcctccggatgaccaggattgcctctgggtttgtcacaagctggaacagggtcctttggaggatggggctctgtgaagaaaaagaggtgaagtgtttggattcagtctgagccaaaggccactttatctgggtttaaggacacaagactccgtgaaagacaagctagttcttcttcctgccccgggagtccactgcaggccgatgcagacgcaaccacttcctcagccgctgtggctgagagcccgccactgcactctatgggcttggtgctgggtatggagaggagggtatgacatagcccctgccctcagagttttttcctactcattatccctgctgtctctggggacttcttaaatgtcagcaatcattgtcatcttcactgttgctccgcagcaccgcacatggctgcacctgggccatctnctctgatgtaaaggctgtgcagccaaaatttgcaattcttcccccagcttttaaaattgtgtaaaatatat

SEQ ID NO: 2472 - DNA, 142 bp, Homo sapiens
catcatgttgccttttaatatggagcatgtgccatagctctccaggagaacccctctgtgtcacagcgaacctcggtcactgacactcaaaagaaggaattatttcaactcaataataaacaaataaccctattttaaaacc

SEQ ID NO: 2473 - DNA, 345 bp, Homo sapiens
  misc_feature 130, 312: n = A,T,C or G
ctctaccatgtgaagattgtgcctgcttcctctttgccttccaccatcattgtaagtttcccgaggcctccccagctatgcctcctgcacagcctgcagaactattacagggagcaacttgaatttaatncttctgattccaagtgtggtgttctgcctgtgcatacggaagaaggacgacacccaggaatgtgcccactgcagatgggagctggaagaaactgccgttatgtggagctcaatgtctccttttggttattttgatgcatgtttggggagggacttttgctgtcccagtgcattgtcttgaantttaaaggttatccttaaaactcatgcttcctt

SEQ ID NO: 2474 - DNA, 204 bp, Homo sapiens
aaacgaaaatggacggccatatgtcacaagagaatgaaatctttgctcccaatccctgtcttcagagctgacctagaagccagccactccactcagacccaattcggatcactatgttcgtgaggactttaacagcatcaggagctccctctgactgctatatgaagagaactgcactcctgcccgagcaacagagcaagactg

SEQ ID NO: 2475 - DNA, 309 bp, Homo sapiens
gcctctctgttccttgagacacagcaatattgaaattgggccaatgaataaccctacagtagcctatcattcactttggggaacggaagctgttgtgagcaaccctatgtgagcctcctgtcctcagctacatcgatgagcttggcagtgaattatctagtcccatccaagcttccagaagactgcagccccagctgacagcttgactgcaacctcatgaatgtttctgagctaggaccacccagttgcttctgaattcctcaccctcagaaactatgatacaataagtgctgattattttaaattgct

SEQ ID NO: 2476 - DNA, 589 bp, Homo sapiens
  misc_feature 31, 473, 557, 561: n = A,T,C or G
gtggggtctttcacaccgtaaggcactcggntcctcggacccaccccgtgtggaagagcatagctgggaccacacaccaaccttccaaggacccactgggagccctactcacacggactgtggccagagccctggccaaggggttctcagtggggaatatgctcacttcatcttggaagattcagccaactctccaccagaaagtcatcatcaacagcccctaccctcgaccatggatgagagcaaatgctccctgggcgccagccagatctggatcctttgaccattccgacagcagtgatcgaggaacagaaatgcccagtgtctccctgactggctggggcatcatccagaccaggcctcctggctgcagcccctctcccaggctgtcctctgcacaagggtctgtagcaagttgcaggcggaggcaggacagccatcctcaagctgcgactcgcgctacgaacactctntacacccaggccttgcggtgtccatggtctcctgggcagatcttggccaagggtgtgctttaggtggcctcatctgcgtccggncgangcctgcccgccggccgtttggtttcttg

SEQ ID NO: 2477 - DNA, 259 bp, Homo sapiens
cacacaacctctgacaaggaagaaaggccacaaggggatgttgatcaaatccaggtcagaactccatcaaggtggacagacactcaacgccctggtagataacaaagacaacggtggacgagcaataaagaaatctaacaaggtctcaaaggaacagcaaatgaatttcaattttaaaaggacatgggtcattctagaaatcaatgtgtgtgcaatccaacagttccatatataaataccagaaaatatttatgaagcg

SEQ ID NO: 2478 - DNA, 191 bp, Homo sapiens
gtgagcacaccagatgctggagcactcctgggaagagaaacagaaagaggaggaggaagggtgccaaaaacaatgtcttatttggccatttttcccttgaccctaatgctagaaaggaaggagagagggaagcttaaataatttataaaatcctggtgaattgtcaattaagtaaatcctttttaaaattt

SEQ ID NO: 2479 - DNA, 620 bp, Homo sapiens
  misc_feature 539, 557, 566, 593: n = A,T,C or G
gcctcataacctcagttgttactgatgcttgttttggttgtcaaagaagaatgaggagaggagatataggaggtggacttggaggtttgttcggagtcactggctgcagcaagtctcctcccacacagccgaccccattcctcagacctgcactctgtacagcatggctactgaccaactcatggttaaatgcgtaggagaaactgaagcacagctgaggtgcccaccatcagtagagctaggccagcatcagaggaagctgggcctccaagcccttctcggactcagaatcctcccagcagatacccaggcagaggagtgtgaactctcagcccctaaaaagggtttttctctattttccatgagttaggatccatgattacagtccagtccctaagctataatctctcagaaagaggagcgacaagaagcggatgtgagaaagtaaagagattttcaggcattaaaagcatggaaagaacaaggcaggggagatgcctacccccctgcctggaggactcttggcgctgtgctgggtncacttctgggaaaaaagngctgaatgnccactccatgcccttctgggtcaaaanccccccctttgttgaataaagattgtt

SEQ ID NO: 2480 - DNA, 495 bp, Homo sapiens
gcagactgggtacagtggaaaactacaggatgcttgttccacatcactaccaaccatgtcaactgcacagacacaaaaggcaaacaggtgaatacagatcaacaagttggtcagttctttgctaatagagctgagccactgtcacttgtcatggatgctgaggccctgaacaacctagaggatctaaaggcaacactgagatcactgacccgagtcctttcccagcgatcctaaaatagatatcacattgcccagatggcaacattttctcagaggacccaaaatttagccccttactgatcttgaggttcctgacccttcatccaacagccctgccttcttcttctccacagcaatgaagagtgaaaggggcggggtcaccctaatgaactgaatcacaggagttaactgctaactccacctgggcacaatgggtcagaccaaagtctaaagctcaaaacagtaaagcagacatttacattggttcacacaggt

SEQ ID NO: 2481 - DNA, 410 bp, Homo sapiens
ccagccttctggaaaattgatgtcattgctcatagaatgaatgatctcacaagataaaagtgtggatgactcagagcagctcatccatccaactagagactagagactgtcaacagctcagtaactttgtctgaatatgaaggacccgaaggaccactgagattggagacagaacaaaggccacaggattctgctgcaaattctaacaggaggaggcaatggcagcccttactaaaaccgcagaactacaggaagaggatccctgagtgggattcctgtgtgaaaggcattttcacctttttgtgtatcttcagaatcttaactttcatgagagaagaatagaaatgcaacaatggaacaatccactgtatacacgtagctgacaatttaataaacttgaaggaaatgct

SEQ ID NO: 2482 - DNA, 316 bp, Homo sapiens
gcatgaagctgcctgacatctaaggatctctgaagagaactgggacctgaaacccatctgaaatgtatctgcagacaggtcaagttcatcgagagtcacctcctgcctgacactccagtcattaattccagccataactacagcttttattggacaagagactgatttcagcactttctacagataagaagaccatcaaccatggattggttctggccggtttccagaagatacactgttacatgccttcatgccctgaaaaggcattttgatgtttagggcctagttgtgatacatttaaatgtctcatttctcc

SEQ ID NO: 2483 - DNA, 295 bp, Homo sapiens
ggcaagccagtcatcggaagaacaacacagccaccctaaagagaaagatgagctgcgaggcactgatggcatgcccactgatgtgtatcaagtgcacgtcccgctgcggaaagagacacgtgttcctccaaaaggcactctgctttttaactctcaggtctcagacaacaaaccaaagacactcctgagacttcagcaggagtgccccagacagtgcatgagcatgtacgatccattccttattttctctatgtcatttccctgcagagtcaaaacaatgcattcatttaaagtc

SEQ ID NO: 2484 - DNA, 426 bp, Homo sapiens
  misc_feature 402, 412: n = A,T,C or G
ttgaatacaaggatgtggtcaactatactgttcttaccgttgaaaaagaagtgctgaggccaggcatggtggctcacacctgtaatcccagcactttgggatgccgaggcagctggatcacttgtggtcaagagttcaagaccagattgggcgacatgatgaaaccccgtctctactacaaatacgaaaattagccattgtggtggcacacgcctgtaatcccagctactcaggaggccgatgtgggagaactgaaccctggaggtggagattgcagtgagccaagatggcgctactgtgctccagcctgggcaacaaagcaacactatgttttaaataaataaataagtgctgagatctcagaaaatacaaaaaaaaaaaggccagcgaggccaattcagnttggacttanccaggctgaacttg

SEQ ID NO: 2485 - DNA, 327 bp, Homo sapiens
gtctcgtaagcagagacactgactaccttgtacgtggagtacctctatttagagtaaaggatagttttccttacagccttggaagactgagagagcatctcctccctagaaaaggacatccatgcttactgccctttataaaagattcaagctttctaagttcagggtgttgctccctgtaatgaaacccactgtgtttccaagtatcacctggccctccctcttgatatccctctttgggaactggggctctaggaactgggaaaggcaatgccaatactctggctattgctattactctgagtaataaaagttcctcatctctac

SEQ ID NO: 2486 - DNA, 475 bp, Homo sapiens
  misc_feature 413: n = A,T,C or G
gatgagacccaaccagaatgtcagaagagctgctccccaaatgtatatgaagaagtaaagtctaatagtggaacaagggttgtctgtggtgaacacaataatgtgccatccagattgcccttcaagaagggacttgctctaactgctaatagtgctgtcaacaaaaagccttcatgggcagattttcagggacctcatcagatgcaaagagacacttcacccaatgtcatgtctttcccaatgtgatccatacccaatgactgattaagatgggagtataagggccagaccactttggtccaaagcaggacaactctgacaggtcattttagtttcagacctccccacagaagccatcaacactgccactggacgaaaactgtaactctacttctccacatgctcaatcttgnatccttgctctgccctcataaatgttcatccaagggtacttcctaataaatattctgcatac

SEQ ID NO: 2487 - DNA, 307 bp, Homo sapiens
aaaatacataccatcagaacaaggcaaaatggaggttatctacattgtatccctctgtcttttaaattctaaagagtccatgttgtgagcatctcaaggaagtgaggcctcctgccaatggccatgtgaatgagcttggaagtggatcttccagcctcagtcaagccttcagataactgcagccccatctgacagtgtgactgcaaccctatgaaagaacctgggccagaaccacccagctaagctgctgctggactcctgactctcagaaactgtgtgaaataataaatgctttttgttttaacct

SEQ ID NO: 2488 - DNA, 305 bp, Homo sapiens
atgtggctaccacaaagggacctgaaggagactgctgaagaccctgagaccctaagctctgctaacccctttttggatgagaatctgtcttctcatggagcctaaagagttgtgaagatgggtatggtggctcacagctgtgatcccaacacttcggaaggctgaggcagacccctgaattccagcaaccagtttgaagtcccccacagaggaacgggatctgcaagagaatacagcttcttcatctccctgtcccatgacttcatcctgtactctttaacaaataaacaattgccacacttcgg

SEQ ID NO: 2489 - DNA, 326 bp, Homo sapiens
ggaggaggcagcctcgtttttgcagcccgagtcgtgggagctgcccgtgtccatggtcatgagaatatgaacttcgagaacatctgacctgctgccacctggccagtgtcctgcctttgaggagtccaggatttacaagcctgctgttctcaaccttgtttggcactaacacaccggagaccatcagtaacggtgggtctgcaaggcacagatcttcaccagggatccttggggagaaaccaagcaaactatttcctgacactagacaggcgtatccctccctttgagaaaattcactttctaaaaccataaacaacagctggttg

SEQ ID NO: 2490 - DNA, 286 bp, Homo sapiens
attttcaaactagaagtggaaaagctactgaagcatcttacaaggacataaagtcaaatttgacctccccactgccttagctttggcaaatgaaagaaaagcagaagtgatatgtgtcatattggatggaaagaattcccctgcccttctcctgtttcagtgattgcagaagcactcaagctgaagcctccctcccctgtgtctatgagtcactctcatgagccatacttgccaccctgcaccagacatctggcataagtgaggaataaacctctgtgtggaatgc

SEQ ID NO: 2491 - DNA, 223 bp, Homo sapiens
ctggcaaaaagagccaatgtgggtaaacgccattccagcagcacagccgaggaggagactccacgtgggaataaatcaagttgaggcagaaactaaataagaccccaattctaatttattaattcaatcttttgctctcattttatctaacacatgaatcagttcaatttccaagccatgtgtgctttcgatgtcaaatatataataaactaagttttcactg

SEQ ID NO: 2492 - DNA, 575 bp, Homo sapiens
  misc_feature 295, 491, 506, 554: n = A,T,C or G
taaatcttgctactgctcactctttcggtccacgctgcttttatgagctgtaacactcacagcgaaaatctgccgcttcacttctgagcccagcgagaccacgagcccaccaggaggaacgaacaactccagacgtgctgccttaagagctgtaacactcaccgcgaaggtctgcagcttcactcctgagccagagagaccacgaacccaccagaaggaagaaactctgaacaccagaagggacagactccagacacgccaccttaagagctgtaacactcaccgcgagggtccncggcttcattcttgaagtcagtgagaccaagaacccaccaattccgggcacactttctctttctttcttttgcctattaaacctgtgctcctaaactcctcatctgtgttcatgttctaaattttcttggcacgagatgacgaactggggtatttatccagacaatgcgggcgcttcaacatgtgcactggtctgntatggaaaatggtgnaatcctgctaaaacttctctgtctctgctacacaagtgaaacctgacnttttcattttggaaacataca

SEQ ID NO: 2493 - DNA, 527 bp, Homo sapiens
  misc_feature 35, 448, 501: n = A,T,C or G
gcaagaaatgaacgtgatattttctccgcctcctntcttctgactgagaagatgattcctggagataatccacttggttatccgcggatgtgaacataatttggaggcagcagtcactccagatggcccgctgaagctgggagtcctgagttaatttcaagccaaatttctcactccctggaggagcagagtggagggtgtgtgtgcatggagaagtccaagatttcatatctggaaaagaagactgggagaggccagcatgaatggccactgtcctcgccaaatctggatggtatgtcttaagtgatacttgcaccagtgaagctgaagatcacaattactgcctcaaatactcactgcctggaaaccggccacctctgctccaaaacaagggcttgctatgtgctgaccttgtgtccaagctccacccctgctgcttgttccaacngtcttgctctctgtcttcctccaatccgactgcagtggggttggcaagtgtangtgtggggggtgggaagtggagatgt

SEQ ID NO: 2494 - DNA, 373 bp, Homo sapiens
gctggagtgatcatggctcactgcagctccaactcttgggcccaagggatcctcccgcctcagcctctgagtacctggggctacagatgcatggccaccacacccagggaaagtgcttacctcaactgccaatttacggaggatctctgtggatggtaaatcagagaagagtgtgaaaggattatgagcaggagaatgacatatttggactatgtcccagagagacaacactgatgataatgaatataatcggctgaaagagaacaccagaacactgtttagaaggcaactataacatctcaaattagtgacgactgtcatctgaaccatggagaagattttctaaaataaaactagtaggaatttgtgactt

SEQ ID NO: 2495 - DNA, 332 bp, Homo sapiens
atggaaaaacaagacaccaagaggctaagtggttttaccaaggatacgtggcttgttaagtgccaagctctccatggcatattatgctgccttccaagtgccttaggctgtgtgttgactggggcatcctctctgcaatcatggctgtgagtgataggtggacttgccaactccctgattacctgccatccatggaaagtcaacacctaaatatgttgtcttatactactagataatatatgactattatactgcaaataatctttttgaagcaaattataggaataaattgagactaagaacaataataaacttgggaaatttacaaaggc

SEQ ID NO: 2496 - DNA, 556 bp, Homo sapiens
  misc_feature 344, 368, 401, 409, 411, 445, 466, 484, 502, 509, 519, 530,533: n = A,T,C or G
caacgtgatggctgcagtccagcatccattgtggaccatgaggcaatcttgagaatggaaaccatacaatacaatagtcaaagaggaaaggttggatcgatcagtgaagtttcacagaagttgtgacatttgggttggatcttgaaagataatgggagctttgaaggtgaatgaaaaaagaagtggaagaacattcctggtagatggaacagcatatgccaaagcacagaggtccacattgcctttatgagctgtaatactcactgcgaaggtctgcagcttcactcctgaagccagcgagaccacgaacccaccgggagaaatgaacaactcccacgcgcggncttaagaactgtaacactcacggnaaaggtcgcacttcacttctgagctacgagacnccaacccncnaaaaggaaaaacttccgacccttccgacattcanaaggaccaactccaacccccnccttaaaagttgaccttncccggaagggtccggggnttttttnttgaatccgnggaaccaaaanccnccattccggcccagttttacccc

SEQ ID NO: 2497 - DNA, 232 bp, Homo sapiens
ccctggcactgaccccagctcggcaacccagatgagagctaattttggggaaatgacttcgcctcttggagtctcagtgagaaaacaccaagaacccctcaaggagcagctgcaggtgaagcgacgacatgcacagcatgcatcagaccgcgctggacagaggcgcttgttcctgtttctacctctccccacttcagaggattccttcaataaaaatcaatttccaaacaag

SEQ ID NO: 2498 - DNA, 467 bp, Homo sapiens
  misc_feature 14, 18, 20, 38, 301, 383, 406: n = A,T,C or G
ggagctcctgcttnagtncnaactgaggacttttacanaggaagggaaactcaactagaccacctcagatgtcataaagaacactgacttggcaccagaagatctgtactcacgtcctaattcttcaatttaacaagctttgtggccttggagaaactggctgacatttttgagcttcagttttcacctttgtaaaatgatgcagttggactttcctactggtcctcaaacctttgtgtcatgcattctatcaacgtttgaactctgtccttaccagccagtttcatccccactctgattnctcctccctccaaccaaagaataaaagcagcaagcaagaaatctccttttccaagcatgacacttacatgtttataggctgnctatggcccttttcataatttgngcttttcaattttttttctgggatttaagttttaaaagaataaattttatcatgaatctat

SEQ ID NO: 2499 - DNA, 124 bp, Homo sapiens
  misc_feature 4, 13, 39: n = A,T,C or G
aaangcatggctntgcctcctcatttgaagcccactcangattgataataaagaaagtaactttgaagtaaacagggccagtcttatgagtcttggagtaataaaatgattctgtgctttgctc

SEQ ID NO: 2500 - DNA, 530 bp, Homo sapiens
  misc_feature 439, 463, 498, 506: n = A,T,C or G
actggacaagccggcaccaccccatgattcaaggatggccatagcccagtgcaggagcagatttgcttccagtttgcccttcctcctagctgaactccaggctccagcccagagaagcaagaaaagagcaaacagaagttattcacatgtgcatcagacacgcaatccataccacagccaccagggtgattgtccaggttgtatttctgctgacatcgacccttcatgccttcctcttgttgacccttccagctacacctagctcggtcctcttcagagccacgccaacacccaggttcctctgcagtgcatccccatggggatttacccggcccccacatgccagaccatcgttggtggacctcatcaccagcatgaagtgggctcttggagttgtcgactgactagttcacaattagtgactcatagcatctcactnatttcttttcatcaagtaggaggnagcaagtctgcacttttgcatcacattttaaaaanatctgggnggttgtttttttgcccaaaactaa

SEQ ID NO: 2501 - DNA, 336 bp, Homo sapiens
gggggagacagagtctcactatgtcactgaagctggagtgcaatggcatgatctcagctcactgcaacctctgcctcccaggttcaagtgactctcttgcctcagcctcctgagatgtgctccaccatgcctggggaatttttctatttttagtagagacagggtttcaccatgttggccaggctggtctcgaactcctgacctcgtgatccacccaccatggcattccaaagtgctgggattataggcgcgagctgctgcacctggccccggttcactcttgtgacaaatttcttcatttgacaaaataaaagaaagaatttcagtacaaaaatc

SEQ ID NO: 2502 - DNA, 534 bp, Homo sapiens
  misc_feature 413, 460, 482, 489, 516, 517: n = A,T,C or G
acagattcttgctctgtccgaccaggctggagtgcagtggcccgatctcagctcactgcaacgtccacctcccgagttcaagcaattcttcggcctcagcctcctgagtagctgggattacagatgtcccccaccacgtccggctaatttttgtatttttagtagagacggggttacaccatgttagccaggctggtcatgaactcctgacctcatgatctgcccactttgacctcccaaagtgctgagattacaggcgtgagccaccacgcccagctgaaactgttctttaaactgggtagcctataccaatgtaaggcaatgttgaggagtagatgcggcctctttcctcaaagagagatccagaaaaggcttctgaaaacccaagacacttgaagatcattgtcctctancaagtctgaacaccatggagaggccacagctgtgaaaaaaagaaaangatgggccccggttttaccaanggccccnttcctggaatgaaaagggaaaaaaccnncctttaaaaaaagagcc

SEQ ID NO: 2503 - DNA, 276 bp, Homo sapiens
atgctcacccttggaatcaagctgccatactgtgaggaagctcaggctacatggagctgtcacatgggtctggccaagacagtccagccaacctctcagccaacagctagcatcaaagcccagaatgatgagggagcaagcctttggatgattccagcaaccagcttttgagctgcccccactgagattccatggtggcacctggtggcacagagacaagctgccccaccacgccctttctgaattcctgacctgaagaataaatgatgttaagcc

SEQ ID NO: 2504 - DNA, 327 bp, Homo sapiens
  misc_feature 2, 9, 26, 30, 38, 47, 50, 64, 65, 115, 117, 121, 124, 161,167, 259, 265, 274: n = A,T,C or G
cncctaaancagggactggggcttgncagntttggaanaattgcgtnggntaattgcttgaagnncgggaaaaaaaaaagccacctggccccagggtcaaaacctttgattgaananagcnccncctaaaaaactgttttgcagaatcaaatgccacaganaagcanggtaaaatcaggggtggaaaaaagaaccgcctggggtccctggtcactttttgtcctcatgtttcccttggcattaataagaaatttaccanaatgcnttttcgatnggataccaaagaagacattctggggttaataaaataacctttttgtaattatg

SEQ ID NO: 2505 - DNA, 184 bp, Homo sapiens; identical to SEQ ID NO: 1505
  misc_feature 20, 28, 33, 34, 39, 44, 58, 59: n = A,T,C or G

SEQ ID NO: 2506 - DNA, 309 bp, Homo sapiens; identical to SEQ ID NO: 1506

SEQ ID NO: 2507 - DNA, 143 bp, Homo sapiens; identical to SEQ ID NO: 1507
  misc_feature 43, 49, 61: n = A,T,C or G

SEQ ID NO: 2508 - DNA, 210 bp, Homo sapiens; identical to SEQ ID NO: 1508

SEQ ID NO: 2509 - DNA, 453 bp, Homo sapiens; identical to SEQ ID NO: 1509
  misc_feature 424, 434, 435: n = A,T,C or G

SEQ ID NO: 2510 - DNA, 344 bp, Homo sapiens; identical to SEQ ID NO: 1510

SEQ ID NO: 2511 - DNA, 473 bp, Homo sapiens; identical to SEQ ID NO: 1511
  misc_feature 414, 428, 444, 455, 456: n = A,T,C or G

SEQ ID NO: 2512 - DNA, 403 bp, Homo sapiens; identical to SEQ ID NO: 1512

SEQ ID NO: 2513 - DNA, 445 bp, Homo sapiens; identical to SEQ ID NO: 1513
  misc_feature 347, 350, 351, 358, 366, 405, 414, 417, 418, 419: n = A,T,C or G

SEQ ID NO: 2514 - DNA, 486 bp, Homo sapiens; identical to SEQ ID NO: 1514
  misc_feature 416, 424, 462: n = A,T,C or G

SEQ ID NO: 2515 - DNA, 443 bp, Homo sapiens; identical to SEQ ID NO: 1515
  misc_feature 1, 3, 4, 11, 12, 16, 22, 23, 25, 30, 34, 36, 37, 41, 44,48, 51, 52, 59, 61, 62, 83, 106, 109, 113, 423: n = A,T,C or G

SEQ ID NO: 2516 - DNA, 360 bp, Homo sapiens; identical to SEQ ID NO: 1516
  misc_feature 343, 344: n = A,T,C or G

SEQ ID NO: 2517 - DNA, 212 bp, Homo sapiens; identical to SEQ ID NO: 1517

SEQ ID NO: 2518 - DNA, 456 bp, Homo sapiens; identical to SEQ ID NO: 1518
  misc_feature 21, 35, 68, 360, 368: n = A,T,C or G

SEQ ID NO: 2519 - DNA, 350 bp, Homo sapiens; identical to SEQ ID NO: 1519
  misc_feature 186, 240, 243, 319, 322, 323, 326, 330, 331: n = A,T,C or G

SEQ ID NO: 2520 - DNA, 457 bp, Homo sapiens; identical to SEQ ID NO: 1520
  misc_feature 14, 25, 428: n = A,T,C or G

SEQ ID NO: 2521 - DNA, 267 bp, Homo sapiens; identical to SEQ ID NO: 1521
  misc_feature 137, 187, 190, 191, 195, 202, 214, 217, 219, 225, 226, 229,233, 237, 239, 241, 246, 250, 251, 252, 254: n = A,T,C or G

SEQ ID NO: 2522 - DNA, 346 bp, Homo sapiens; identical to SEQ ID NO: 1522
  misc_feature 14, 31, 32, 148, 236, 244, 254, 256, 268, 285, 289, 290,302, 305, 306, 311, 324, 331: n = A,T,C or G

SEQ ID NO: 2523 - DNA, 502 bp, Homo sapiens; identical to SEQ ID NO: 1523
  misc_feature 403, 418, 424, 431, 438, 439, 442, 445, 450, 451, 459, 462,467, 468, 469, 475, 476, 477, 489: n = A,T,C or G

SEQ ID NO: 2524 - DNA, 104 bp, Homo sapiens; identical to SEQ ID NO: 1524
  misc_feature 3, 20, 57, 59, 61, 74, 80, 81: n = A,T,C or G

SEQ ID NO: 2525 - DNA, 260 bp, Homo sapiens; identical to SEQ ID NO: 1525

SEQ ID NO: 2526 - DNA, 425 bp, Homo sapiens; identical to SEQ ID NO: 1526
  misc_feature 118: n = A,T,C or G

SEQ ID NO: 2527 - DNA, 533 bp, Homo sapiens; identical to SEQ ID NO: 1527
  misc_feature 53, 68, 71, 211, 329, 372, 409, 411, 443, 447, 461, 467,469, 476, 498, 500, 507, 516: n = A,T,C or G

SEQ ID NO: 2528 - DNA, 337 bp, Homo sapiens; identical to SEQ ID NO: 1528

SEQ ID NO: 2529 - DNA, 274 bp, Homo sapiens; identical to SEQ ID NO: 1529

SEQ ID NO: 2530 - DNA, 290 bp, Homo sapiens; identical to SEQ ID NO: 1530

SEQ ID NO: 2531 - DNA, 384 bp, Homo sapiens; identical to SEQ ID NO: 1531

SEQ ID NO: 2532 - DNA, 516 bp, Homo sapiens; identical to SEQ ID NO: 1532
  misc_feature 18, 40, 47, 53, 56, 62, 72, 79, 87, 105, 170, 312, 318, 351,361, 392, 394, 423, 444, 451, 475, 477, 489, 499: n = A,T,C or G

SEQ ID NO: 2533 - DNA, 481 bp, Homo sapiens; identical to SEQ ID NO: 1533
  misc_feature 155: n = A,T,C or G

SEQ ID NO: 2534 - DNA, 491 bp, Homo sapiens; identical to SEQ ID NO: 1534
  misc_feature 458: n = A,T,C or G

SEQ ID NO: 2535 - DNA, 323 bp, Homo sapiens; identical to SEQ ID NO: 1535
  misc_feature 284: n = A,T,C or G

SEQ ID NO: 2536 - DNA, 496 bp, Homo sapiens; identical to SEQ ID NO: 1536
  misc_feature 240, 452, 469: n = A,T,C or G

SEQ ID NO: 2537 - DNA, 331 bp, Homo sapiens; identical to SEQ ID NO: 1537

SEQ ID NO: 2538 - DNA, 238 bp, Homo sapiens; identical to SEQ ID NO: 1538

SEQ ID NO: 2539 - DNA, 565 bp, Homo sapiens; identical to SEQ ID NO: 1539
  misc_feature 15, 32, 58, 76, 79, 83, 85, 119, 170, 205, 239, 273, 322,332, 381, 383, 424, 522, 529, 533: n = A,T,C or G

SEQ ID NO: 2540 - DNA, 684 bp, Homo sapiens; identical to SEQ ID NO: 1540
  misc_feature 36, 238, 260, 284, 307, 318, 348, 350, 450, 487, 571, 599,604, 609, 616, 629, 634, 641, 666: n = A,T,C or G

SEQ ID NO: 2541 - DNA, 259 bp, Homo sapiens; identical to SEQ ID NO: 1541

SEQ ID NO: 2542 - DNA, 346 bp, Homo sapiens; identical to SEQ ID NO: 1542

SEQ ID NO: 2543 - DNA, 203 bp, Homo sapiens; identical to SEQ ID NO: 1543

SEQ ID NO: 2544 - DNA, 213 bp, Homo sapiens; identical to SEQ ID NO: 1544
  misc_feature 52: n = A,T,C or G

SEQ ID NO: 2545 - DNA, 341 bp, Homo sapiens; identical to SEQ ID NO: 1545
  misc_feature 284, 295: n = A,T,C or G

SEQ ID NO: 2546 - DNA, 337 bp, Homo sapiens; identical to SEQ ID NO: 1546
  misc_feature 272, 278, 279, 283, 285, 302: n = A,T,C or G

SEQ ID NO: 2547 - DNA, 308 bp, Homo sapiens; identical to SEQ ID NO: 1547
  misc_feature 286, 289, 292: n = A,T,C or G

SEQ ID NO: 2548 - DNA, 331 bp, Homo sapiens; identical to SEQ ID NO: 1548
  misc_feature 282, 284, 292: n = A,T,C or G

SEQ ID NO: 2549 - DNA, 322 bp, Homo sapiens; identical to SEQ ID NO: 1549
  misc_feature 283, 290: n = A,T,C or G

SEQ ID NO: 2550 - DNA, 330 bp, Homo sapiens; identical to SEQ ID NO: 1550
  misc_feature 284, 288, 293, 297, 312: n = A,T,C or G

SEQ ID NO: 2551 - DNA, 325 bp, Homo sapiens; identical to SEQ ID NO: 1551
  misc_feature 2: n = A,T,C or G

SEQ ID NO: 2552 - DNA, 330 bp, Homo sapiens; identical to SEQ ID NO: 1552
  misc_feature 285: n = A,T,C or G

SEQ ID NO: 2553 - DNA, 199 bp, Homo sapiens; identical to SEQ ID NO: 1553

SEQ ID NO: 2554 - DNA, 419 bp, Homo sapiens; identical to SEQ ID NO: 1554
  misc_feature 143, 156, 195, 218, 252, 271, 280, 296, 302, 305, 340, 348,351, 370, 376, 390, 400, 406: n = A,T,C or G

SEQ ID NO: 2555 - DNA, 280 bp, Homo sapiens; identical to SEQ ID NO: 1555
  misc_feature 138, 235, 240, 245: n = A,T,C or G

SEQ ID NO: 2556 - DNA, 359 bp, Homo sapiens; identical to SEQ ID NO: 1556
  misc_feature 109, 172, 184: n = A,T,C or G

SEQ ID NO: 2557 - DNA, 70 bp, Homo sapiens; identical to SEQ ID NO: 1557
  misc_feature 1, 3, 12, 13, 15, 22, 43, 49: n = A,T,C or G

SEQ ID NO: 2558 - DNA, 178 bp, Homo sapiens; identical to SEQ ID NO: 1558
  misc_feature 16, 41, 47, 48, 51, 65, 85, 87, 125: n = A,T,C or G

SEQ ID NO: 2559 - DNA, 167 bp, Homo sapiens; identical to SEQ ID NO: 1559

SEQ ID NO: 2560 - DNA, 435 bp, Homo sapiens; identical to SEQ ID NO: 1560
  misc_feature 374, 375, 383, 385, 386, 387, 388, 391, 402, 407, 408, 409,410, 412, 414, 417: n = A,T,C or G

SEQ ID NO: 2561 - DNA, 355 bp, Homo sapiens; identical to SEQ ID NO: 1561

SEQ ID NO: 2562 - DNA, 340 bp, Homo sapiens; identical to SEQ ID NO: 1562
  misc_feature 146: n = A,T,C or G

SEQ ID NO: 2563 - DNA, 439 bp, Homo sapiens; identical to SEQ ID NO: 1563
  misc_feature 380, 388, 393, 394, 400, 406, 410, 411, 414, 415, 419, 421,425: n = A,T,C or G

SEQ ID NO: 2564 - DNA, 347 bp, Homo sapiens; identical to SEQ ID NO: 1564
  misc_feature 326: n = A,T,C or G

SEQ ID NO: 2565 - DNA, 328 bp, Homo sapiens; identical to SEQ ID NO: 1565
  misc_feature 263, 270, 272, 278, 281, 283, 286, 288, 290, 294, 297, 300,305, 309, 311, 315: n = A,T,C or G

SEQ ID NO: 2566 - DNA, 386 bp, Homo sapiens; identical to SEQ ID NO: 1566
  misc_feature 363: n = A,T,C or G

SEQ ID NO: 2567 - DNA, 459 bp, Homo sapiens; identical to SEQ ID NO: 1567

SEQ ID NO: 2568 - DNA, 528 bp, Homo sapiens; identical to SEQ ID NO: 1568

SEQ ID NO: 2569 - DNA, 296 bp, Homo sapiens; identical to SEQ ID NO: 1569

SEQ ID NO: 2570 - DNA, 410 bp, Homo sapiens; identical to SEQ ID NO: 1570
  misc_feature 354: n = A,T,C or G

SEQ ID NO: 2571 - DNA, 357 bp, Homo sapiens; identical to SEQ ID NO: 1571
  misc_feature 137, 142, 238, 290, 320, 329: n = A,T,C or G

SEQ ID NO: 2572 - DNA, 219 bp, Homo sapiens; identical to SEQ ID NO: 1572

SEQ ID NO: 2573 - DNA, 401 bp, Homo sapiens; identical to SEQ ID NO: 1573

SEQ ID NO: 2574 - DNA, 387 bp, Homo sapiens; identical to SEQ ID NO: 1574
  misc_feature 18: n = A,T,C or G

SEQ ID NO: 2575 - DNA, 331 bp, Homo sapiens; identical to SEQ ID NO: 1575
  misc_feature 207, 272, 274, 281, 299, 315: n = A,T,C or G

SEQ ID NO: 2576 - DNA, 151 bp, Homo sapiens; identical to SEQ ID NO: 1576

SEQ ID NO: 2577 - DNA, 305 bp, Homo sapiens; identical to SEQ ID NO: 1577

SEQ ID NO: 2578 - DNA, 329 bp, Homo sapiens; identical to SEQ ID NO: 1578
  misc_feature 268, 275, 286, 289, 291, 305, 307, 310, 312, 314, 316: n = A,T,C or G

SEQ ID NO: 2579 - DNA, 443 bp, Homo sapiens; identical to SEQ ID NO: 1579
  misc_feature 424: n = A,T,C or G

SEQ ID NO: 2580 - DNA, 352 bp, Homo sapiens; identical to SEQ ID NO: 1580

SEQ ID NO: 2581 - DNA, 268 bp, Homo sapiens; identical to SEQ ID NO: 1581

SEQ ID NO: 2582 - DNA, 179 bp, Homo sapiens; identical to SEQ ID NO: 1582

SEQ ID NO: 2583 - DNA, 362 bp, Homo sapiens; identical to SEQ ID NO: 1583

SEQ ID NO: 2584 - DNA, 431 bp, Homo sapiens; identical to SEQ ID NO: 1584
  misc_feature 404: n = A,T,C or G

SEQ ID NO: 2585 - DNA, 216 bp, Homo sapiens; identical to SEQ ID NO: 1585
  misc_feature 71, 134: n = A,T,C or G

SEQ ID NO: 2586 - DNA, 260 bp, Homo sapiens; identical to SEQ ID NO: 1586

SEQ ID NO: 2587 - DNA, 265 bp, Homo sapiens; identical to SEQ ID NO: 1587

SEQ ID NO: 2588 - DNA, 326 bp, Homo sapiens; identical to SEQ ID NO: 1588

SEQ ID NO: 2589 - DNA, 367 bp, Homo sapiens; identical to SEQ ID NO: 1589

SEQ ID NO: 2590 - DNA, 371 bp, Homo sapiens; identical to SEQ ID NO: 1590

SEQ ID NO: 2591 - DNA, 415 bp, Homo sapiens; identical to SEQ ID NO: 1591
  misc_feature 382: n = A,T,C or G

SEQ ID NO: 2592 - DNA, 407 bp, Homo sapiens; identical to SEQ ID NO: 1592
  misc_feature 26: n = A,T,C or G

SEQ ID NO: 2593 - DNA, 306 bp, Homo sapiens; identical to SEQ ID NO: 1593
  misc_feature 6, 102, 263, 279: n = A,T,C or G

SEQ ID NO: 2594 - DNA, 209 bp, Homo sapiens; identical to SEQ ID NO: 1594
  misc_feature 4, 73: n = A,T,C or G

SEQ ID NO: 2595 - DNA, 229 bp, Homo sapiens; identical to SEQ ID NO: 1595

SEQ ID NO: 2596 - DNA, 308 bp, Homo sapiens; identical to SEQ ID NO: 1596
  misc_feature 5, 286: n = A,T,C or G

SEQ ID NO: 2597 - DNA, 339 bp, Homo sapiens; identical to SEQ ID NO: 1597
  misc_feature 80: n = A,T,C or G

SEQ ID NO: 2598 - DNA, 75 bp, Homo sapiens; identical to SEQ ID NO: 1598

SEQ ID NO: 2599 - DNA, 489 bp, Homo sapiens; identical to SEQ ID NO: 1599

SEQ ID NO: 2600 - DNA, 390 bp, Homo sapiens; identical to SEQ ID NO: 1600
  misc_feature 58, 67, 85, 102, 128, 154, 159, 161, 165, 187, 204, 255,335, 354, 355, 360: n = A,T,C or G

SEQ ID NO: 2601 - DNA, 361 bp, Homo sapiens; identical to SEQ ID NO: 1601
  misc_feature 34, 46, 56, 58, 60, 63, 64, 65, 67, 69, 78, 80, 93, 94, 95,101, 108, 148, 161, 164, 169, 218, 220: n = A,T,C or G

SEQ ID NO: 2602 - DNA, 433 bp, Homo sapiens; identical to SEQ ID NO: 1602
  misc_feature 375, 377, 381, 393, 395, 409, 418, 419, 420: n = A,T,C or G

SEQ ID NO: 2603 - DNA, 387 bp, Homo sapiens; identical to SEQ ID NO: 1603
  misc_feature 362: n = A,T,C or G

SEQ ID NO: 2604 - DNA, 327 bp, Homo sapiens; identical to SEQ ID NO: 1604

SEQ ID NO: 2605 - DNA, 287 bp, Homo sapiens; identical to SEQ ID NO: 1605
  misc_feature 6, 78, 189, 208: n = A,T,C or G

SEQ ID NO: 2606 - DNA, 129 bp, Homo sapiens; identical to SEQ ID NO: 1606

SEQ ID NO: 2607 - DNA, 462 bp, Homo sapiens; identical to SEQ ID NO: 1607
  misc_feature 400, 422, 432: n = A,T,C or G

SEQ ID NO: 2608 - DNA, 257 bp, Homo sapiens; identical to SEQ ID NO: 1608

SEQ ID NO: 2609 - DNA, 91 bp, Homo sapiens; identical to SEQ ID NO: 1609

SEQ ID NO: 2610 - DNA, 205 bp, Homo sapiens; identical to SEQ ID NO: 1610
  misc_feature 23, 24, 34, 51, 58, 66, 67, 68, 96, 118, 134, 173, 174, 189: n = A,T,C or G

SEQ ID NO: 2611 - DNA, 464 bp, Homo sapiens; identical to SEQ ID NO: 1611
  misc_feature 20, 77, 79, 85, 119, 153, 155, 156, 434: n = A,T,C or G

SEQ ID NO: 2612 - DNA, 288 bp, Homo sapiens; identical to SEQ ID NO: 1612

SEQ ID NO: 2613 - DNA, 419 bp, Homo sapiens; identical to SEQ ID NO: 1613
  misc_feature 22, 131, 289: n = A,T,C or G

SEQ ID NO: 2614 - DNA, 469 bp, Homo sapiens; identical to SEQ ID NO: 1614
  misc_feature 456: n = A,T,C or G

SEQ ID NO: 2615 - DNA, 349 bp, Homo sapiens; identical to SEQ ID NO: 1615
  misc_feature 220: n = A,T,C or G

SEQ ID NO: 2616 - DNA, 476 bp, Homo sapiens; identical to SEQ ID NO: 1616
  misc_feature 459: n = A,T,C or G

SEQ ID NO: 2617 - DNA, 448 bp, Homo sapiens; identical to SEQ ID NO: 1617
  misc_feature 372, 397, 398, 399, 400, 401, 402, 403, 404, 405, 406, 407,408, 409, 410, 411, 412, 413, 414, 415, 416, 417, 418, 419,420, 421, 422, 423, 424, 432, 433: n = A,T,C or G

SEQ ID NO: 2618 - DNA, 221 bp, Homo sapiens; identical to SEQ ID NO: 1618

SEQ ID NO: 2619 - DNA, 389 bp, Homo sapiens; identical to SEQ ID NO: 1619

SEQ ID NO: 2620 - DNA, 261 bp, Homo sapiens; identical to SEQ ID NO: 1620

SEQ ID NO: 2621 - DNA, 454 bp, Homo sapiens; identical to SEQ ID NO: 1621
  misc_feature 373: n = A,T,C or G

SEQ ID NO: 2622 - DNA, 238 bp, Homo sapiens; identical to SEQ ID NO: 1622

SEQ ID NO: 2623 - DNA, 208 bp, Homo sapiens; identical to SEQ ID NO: 1623

SEQ ID NO: 2624 - DNA, 384 bp, Homo sapiens; identical to SEQ ID NO: 1624
  misc_feature 22, 363: n = A,T,C or G

SEQ ID NO: 2625 - DNA, 356 bp, Homo sapiens; identical to SEQ ID NO: 1625
  misc_feature 184: n = A,T,C or G

SEQ ID NO: 2626 - DNA, 252 bp, Homo sapiens; identical to SEQ ID NO: 1626

SEQ ID NO: 2627 - DNA, 456 bp, Homo sapiens; identical to SEQ ID NO: 1627
  misc_feature 338, 362, 386, 407: n = A,T,C or G

SEQ ID NO: 2628 - DNA, 462 bp, Homo sapiens; identical to SEQ ID NO: 1628
  misc_feature 344, 390, 392, 411, 427, 435: n = A,T,C or G

SEQ ID NO: 2629 - DNA, 356 bp, Homo sapiens; identical to SEQ ID NO: 1629
  misc_feature 11, 32, 37, 40, 44, 48, 86, 106: n = A,T,C or G

SEQ ID NO: 2630 - DNA, 245 bp, Homo sapiens; identical to SEQ ID NO: 1630

SEQ ID NO: 2631 - DNA, 385 bp, Homo sapiens; identical to SEQ ID NO: 1631

SEQ ID NO: 2632 - DNA, 400 bp, Homo sapiens; identical to SEQ ID NO: 1632
  misc_feature 327, 376: n = A,T,C or G

SEQ ID NO: 2633 - DNA, 216 bp, Homo sapiens; identical to SEQ ID NO: 1633
  misc_feature 32, 119: n = A,T,C or G

SEQ ID NO: 2634 - DNA, 450 bp, Homo sapiens; identical to SEQ ID NO: 1634
  misc_feature 369, 377, 393, 397, 409: n = A,T,C or G

SEQ ID NO: 2635 - DNA, 330 bp, Homo sapiens; identical to SEQ ID NO: 1635

SEQ ID NO: 2636 - DNA, 236 bp, Homo sapiens; identical to SEQ ID NO: 1636
  misc_feature 182, 195, 223: n = A,T,C or G

SEQ ID NO: 2637 - DNA, 250 bp, Homo sapiens; identical to SEQ ID NO: 1637

SEQ ID NO: 2638 - DNA, 313 bp, Homo sapiens; identical to SEQ ID NO: 1638

SEQ ID NO: 2639 - DNA, 443 bp, Homo sapiens; identical to SEQ ID NO: 1639
  misc_feature 376, 394, 402, 411, 414: n = A,T,C or G

SEQ ID NO: 2640 - DNA, 342 bp, Homo sapiens; identical to SEQ ID NO: 1640
  misc_feature 184, 207, 323, 329: n = A,T,C or G

SEQ ID NO: 2641 - DNA, 393 bp, Homo sapiens; identical to SEQ ID NO: 1641
  misc_feature 220, 358, 365, 367: n = A,T,C or G

SEQ ID NO: 2642 - DNA, 281 bp, Homo sapiens; identical to SEQ ID NO: 1642
  misc_feature 14, 18, 20, 24, 25, 32, 44, 47, 52, 60, 62, 74, 75, 77, 81,120, 146, 171, 251: n = A,T,C or G

SEQ ID NO: 2643 - DNA, 472 bp, Homo sapiens; identical to SEQ ID NO: 1643
  misc_feature 357, 364, 375: n = A,T,C or G

SEQ ID NO: 2644 - DNA, 465 bp, Homo sapiens; identical to SEQ ID NO: 1644

SEQ ID NO: 2645 - DNA, 434 bp, Homo sapiens; identical to SEQ ID NO: 1645
  misc_feature 275, 375, 376, 377, 384, 386, 392, 395, 399, 404, 406, 409,410, 417: n = A,T,C or G

SEQ ID NO: 2646 - DNA, 435 bp, Homo sapiens; identical to SEQ ID NO: 1646
  misc_feature 373, 374, 376, 377, 379, 382, 384, 388, 391, 393, 396, 404,407, 408, 415: n = A,T,C or G

SEQ ID NO: 2647 - DNA, 81 bp, Homo sapiens; identical to SEQ ID NO: 1647

SEQ ID NO: 2648 - DNA, 198 bp, Homo sapiens; identical to SEQ ID NO: 1648

SEQ ID NO: 2649 - DNA, 367 bp, Homo sapiens; identical to SEQ ID NO: 1649
  misc_feature 15: n = A,T,C or G

SEQ ID NO: 2650 - DNA, 408 bp, Homo sapiens; identical to SEQ ID NO: 1650

SEQ ID NO: 2651 - DNA, 364 bp, Homo sapiens; identical to SEQ ID NO: 1651

SEQ ID NO: 2652 - DNA, 291 bp, Homo sapiens; identical to SEQ ID NO: 1652

SEQ ID NO: 2653 - DNA, 454 bp, Homo sapiens; identical to SEQ ID NO: 1653
  misc_feature 23, 25, 27, 32: n = A,T,C or G

SEQ ID NO: 2654 - DNA, 373 bp, Homo sapiens; identical to SEQ ID NO: 1654

SEQ ID NO: 2655 - DNA, 391 bp, Homo sapiens; identical to SEQ ID NO: 1655
  misc_feature 16, 17, 20, 23, 28, 29, 31, 40, 46, 63, 93: n = A,T,C or G

SEQ ID NO: 2656 - DNA, 285 bp, Homo sapiens; identical to SEQ ID NO: 1656

SEQ ID NO: 2657 - DNA, 180 bp, Homo sapiens; identical to SEQ ID NO: 1657

SEQ ID NO: 2658 - DNA, 235 bp, Homo sapiens; identical to SEQ ID NO: 1658
  misc_feature 11, 39, 40, 58, 82, 90, 111, 113, 128, 129, 145, 164, 188,198, 201, 215: n = A,T,C or G

SEQ ID NO: 2659 - DNA, 588 bp, Homo sapiens; identical to SEQ ID NO: 1659

SEQ ID NO: 2660 - DNA, 342 bp, Homo sapiens; identical to SEQ ID NO: 1660

SEQ ID NO: 2661 - DNA, 350 bp, Homo sapiens; identical to SEQ ID NO: 1661

SEQ ID NO: 2662 - DNA, 348 bp, Homo sapiens; identical to SEQ ID NO: 1662

SEQ ID NO: 2663 - DNA, 574 bp, Homo sapiens; identical to SEQ ID NO: 1663
  misc_feature 5, 7, 535, 537: n = A,T,C or G

SEQ ID NO: 2664 - DNA, 240 bp, Homo sapiens; identical to SEQ ID NO: 1664
  misc_feature 194: n = A,T,C or G

SEQ ID NO: 2665 - DNA, 454 bp, Homo sapiens; identical to SEQ ID NO: 1665

SEQ ID NO: 2666 - DNA, 262 bp, Homo sapiens; identical to SEQ ID NO: 1666
  misc_feature 165: n = A,T,C or G

SEQ ID NO: 2667 - DNA, 297 bp, Homo sapiens; identical to SEQ ID NO: 1667

SEQ ID NO: 2668 - DNA, 113 bp, Homo sapiens; identical to SEQ ID NO: 1668

SEQ ID NO: 2669 - DNA, 466 bp, Homo sapiens; identical to SEQ ID NO: 1669
  misc_feature 376, 377, 422, 428, 429, 434, 451: n = A,T,C or G

SEQ ID NO: 2670 - DNA, 354 bp, Homo sapiens; identical to SEQ ID NO: 1670

SEQ ID NO: 2671 - DNA, 181 bp, Homo sapiens; identical to SEQ ID NO: 1671

SEQ ID NO: 2672 - DNA, 240 bp, Homo sapiens; identical to SEQ ID NO: 1672

SEQ ID NO: 2673 - DNA, 173 bp, Homo sapiens; identical to SEQ ID NO: 1673

SEQ ID NO: 2674 - DNA, 317 bp, Homo sapiens; identical to SEQ ID NO: 1674

SEQ ID NO: 2675 - DNA, 170 bp, Homo sapiens; identical to SEQ ID NO: 1675

SEQ ID NO: 2676 - DNA, 220 bp, Homo sapiens; identical to SEQ ID NO: 1676

SEQ ID NO: 2677 - DNA, 360 bp, Homo sapiens; identical to SEQ ID NO: 1677

SEQ ID NO: 2678 - DNA, 362 bp, Homo sapiens; identical to SEQ ID NO: 1678

SEQ ID NO: 2679 - DNA, 438 bp, Homo sapiens; identical to SEQ ID NO: 1679
  misc_feature 220, 319, 334, 364, 368, 370, 395, 396, 403, 404, 407, 419: n = A,T,C or G

SEQ ID NO: 2680 - DNA, 462 bp, Homo sapiens; identical to SEQ ID NO: 1680
  misc_feature 408, 424, 438, 439, 447: n = A,T,C or G

SEQ ID NO: 2681 - DNA, 241 bp, Homo sapiens; identical to SEQ ID NO: 1681

SEQ ID NO: 2682 - DNA, 476 bp, Homo sapiens; identical to SEQ ID NO: 1682
  misc_feature 168: n = A,T,C or G

SEQ ID NO: 2683 - DNA, 226 bp, Homo sapiens; identical to SEQ ID NO: 1683

SEQ ID NO: 2684 - DNA, 90 bp, Homo sapiens; identical to SEQ ID NO: 1684
  misc_feature 12, 15, 22, 30, 32, 33, 37, 38, 51, 72: n = A,T,C or G

SEQ ID NO: 2685 - DNA, 261 bp, Homo sapiens; identical to SEQ ID NO: 1685
  misc_feature 138, 145, 153, 154, 159, 163, 164, 165, 175, 184, 185, 191,197, 199, 211, 219, 224, 225, 226, 227, 230, 234, 241: n = A,T,C or G

SEQ ID NO: 2686 - DNA, 352 bp, Homo sapiens; identical to SEQ ID NO: 1686

SEQ ID NO: 2687 - DNA, 465 bp, Homo sapiens; identical to SEQ ID NO: 1687
  misc_feature 351, 352, 356, 357, 360, 363, 373, 374, 375: n = A,T,C or G

SEQ ID NO: 2688 - DNA, 134 bp, Homo sapiens; identical to SEQ ID NO: 1688

SEQ ID NO: 2689 - DNA, 421 bp, Homo sapiens; identical to SEQ ID NO: 1689
  misc_feature 21, 341, 368, 371, 376, 392, 399: n = A,T,C or G

SEQ ID NO: 2690 - DNA, 472 bp, Homo sapiens; identical to SEQ ID NO: 1690
  misc_feature 355, 366, 456: n = A,T,C or G

SEQ ID NO: 2691 - DNA, 367 bp, Homo sapiens; identical to SEQ ID NO: 1691
  misc_feature 53, 96, 99, 102, 103, 109, 118, 124, 129, 140, 142, 151,152, 160, 185, 200, 205, 206, 207, 208, 224, 246, 347: n = A,T,C or G

SEQ ID NO: 2692 - DNA, 507 bp, Homo sapiens; identical to SEQ ID NO: 1692
  misc_feature 457, 481: n = A,T,C or G

SEQ ID NO: 2693 - DNA, 176 bp, Homo sapiens; identical to SEQ ID NO: 1693

SEQ ID NO: 2694 - DNA, 304 bp, Homo sapiens; identical to SEQ ID NO: 1694

SEQ ID NO: 2695 - DNA, 422 bp, Homo sapiens; identical to SEQ ID NO: 1695
  misc_feature 317, 389, 392, 397: n = A,T,C or G

SEQ ID NO: 2696 - DNA, 308 bp, Homo sapiens; identical to SEQ ID NO: 1696

SEQ ID NO: 2697 - DNA, 361 bp, Homo sapiens; identical to SEQ ID NO: 1697
  misc_feature 280, 282, 284, 290, 295, 300, 302, 304, 306, 312, 313, 314,319, 323, 327, 337, 340, 344, 346, 347: n = A,T,C or G

SEQ ID NO: 2698 - DNA, 333 bp, Homo sapiens; identical to SEQ ID NO: 1698
  misc_feature 132: n = A,T,C or G

SEQ ID NO: 2699 - DNA, 128 bp, Homo sapiens; identical to SEQ ID NO: 1699

SEQ ID NO: 2700 - DNA, 475 bp, Homo sapiens; identical to SEQ ID NO: 1700
  misc_feature 355, 363, 382, 414, 419, 456: n = A,T,C or G

SEQ ID NO: 2701 - DNA, 356 bp, Homo sapiens; identical to SEQ ID NO: 1701
  misc_feature 19, 37: n = A,T,C or G

SEQ ID NO: 2702 - DNA, 344 bp, Homo sapiens; identical to SEQ ID NO: 1702
  misc_feature 297: n = A,T,C or G

SEQ ID NO: 2703 - DNA, 241 bp, Homo sapiens; identical to SEQ ID NO: 1703

SEQ ID NO: 2704 - DNA, 457 bp, Homo sapiens; identical to SEQ ID NO: 1704
  misc_feature 370, 381, 382, 407, 416, 426: n = A,T,C or G

SEQ ID NO: 2705 - DNA, 482 bp, Homo sapiens; identical to SEQ ID NO: 1705
  misc_feature 200, 352, 356, 366, 377, 380, 383, 388, 389, 396, 411, 415,416, 422: n = A,T,C or G

SEQ ID NO: 2706 - DNA, 349 bp, Homo sapiens; identical to SEQ ID NO: 1706
  misc_feature 331: n = A,T,C or G

SEQ ID NO: 2707 - DNA, 350 bp, Homo sapiens; identical to SEQ ID NO: 1707

SEQ ID NO: 2708 - DNA, 478 bp, Homo sapiens; identical to SEQ ID NO: 1708
  misc_feature 389, 397: n = A,T,C or G

SEQ ID NO: 2709 - DNA, 472 bp, Homo sapiens; identical to SEQ ID NO: 1709
  misc_feature 318, 340, 343, 346, 352, 357, 376, 379, 387, 391, 392, 407,430, 432, 434, 435, 437, 439, 442, 452, 459: n = A,T,C or G

SEQ ID NO: 2710 - DNA, 147 bp, Homo sapiens; identical to SEQ ID NO: 1710

SEQ ID NO: 2711 - DNA, 338 bp, Homo sapiens; identical to SEQ ID NO: 1711

SEQ ID NO: 2712 - DNA, 363 bp, Homo sapiens; identical to SEQ ID NO: 1712
  misc_feature 8, 23, 25, 28, 31, 45, 49, 61, 63, 95, 113, 141, 159, 242,335: n = A,T,C or G

SEQ ID NO: 2713 - DNA, 236 bp, Homo sapiens; identical to SEQ ID NO: 1713
  misc_feature 180: n = A,T,C or G

SEQ ID NO: 2714 - DNA, 377 bp, Homo sapiens; identical to SEQ ID NO: 1714

SEQ ID NO: 2715 - DNA, 356 bp, Homo sapiens; identical to SEQ ID NO: 1715

SEQ ID NO: 2716 - DNA, 436 bp, Homo sapiens; identical to SEQ ID NO: 1716
  misc_feature 389, 394, 397, 415, 420: n = A,T,C or G

SEQ ID NO: 2717 - DNA, 441 bp, Homo sapiens; identical to SEQ ID NO: 1717
  misc_feature 336: n = A,T,C or G

SEQ ID NO: 2718 - DNA, 443 bp, Homo sapiens; identical to SEQ ID NO: 1718
  misc_feature 206, 305, 310, 313, 324, 330, 355, 368, 377, 401: n = A,T,C or G

SEQ ID NO: 2719 - DNA, 436 bp, Homo sapiens; identical to SEQ ID NO: 1719
  misc_feature 141, 146, 152, 351, 359, 367, 380, 389, 397, 413, 415, 419: n = A,T,C or G

SEQ ID NO: 2720 - DNA, 457 bp, Homo sapiens; identical to SEQ ID NO: 1720
  misc_feature 334, 358: n = A,T,C or G

SEQ ID NO: 2721 - DNA, 105 bp, Homo sapiens; identical to SEQ ID NO: 1721
  misc_feature 14, 20, 21, 40, 60, 66, 69, 72, 79: n = A,T,C or G

SEQ ID NO: 2722 - DNA, 427 bp, Homo sapiens; identical to SEQ ID NO: 1722
  misc_feature 396: n = A,T,C or G

SEQ ID NO: 2723 - DNA, 315 bp, Homo sapiens; identical to SEQ ID NO: 1723

SEQ ID NO: 2724 - DNA, 415 bp, Homo sapiens; identical to SEQ ID NO: 1724
  misc_feature 308, 350, 360, 362, 365, 371, 383, 385: n = A,T,C or G

SEQ ID NO: 2725 - DNA, 350 bp, Homo sapiens; identical to SEQ ID NO: 1725
  misc_feature 291, 303, 305, 324, 328, 330: n = A,T,C or G

SEQ ID NO: 2726 - DNA, 91 bp, Homo sapiens; identical to SEQ ID NO: 1726

SEQ ID NO: 2727 - DNA, 285 bp, Homo sapiens; identical to SEQ ID NO: 1727

SEQ ID NO: 2728 - DNA, 71 bp, Homo sapiens; identical to SEQ ID NO: 1728

SEQ ID NO: 2729 - DNA, 155 bp, Homo sapiens; identical to SEQ ID NO: 1729
  misc_feature 1, 13, 35, 40, 102: n = A,T,C or G

SEQ ID NO: 2730 - DNA, 428 bp, Homo sapiens; identical to SEQ ID NO: 1730
  misc_feature 367, 370: n = A,T,C or G

SEQ ID NO: 2731 - DNA, 355 bp, Homo sapiens; identical to SEQ ID NO: 1731
  misc_feature 11, 26, 109: n = A,T,C or G

SEQ ID NO: 2732 - DNA, 381 bp, Homo sapiens; identical to SEQ ID NO: 1732
  misc_feature 358: n = A,T,C or G

SEQ ID NO: 2733 - DNA, 449 bp, Homo sapiens; identical to SEQ ID NO: 1733
  misc_feature 5, 424: n = A,T,C or G

SEQ ID NO: 2734 - DNA, 366 bp, Homo sapiens; identical to SEQ ID NO: 1734
  misc_feature 316, 322, 324, 325, 330, 331, 334, 338, 342, 344, 346, 349: n = A,T,C or G

SEQ ID NO: 2735 - DNA, 370 bp, Homo sapiens; identical to SEQ ID NO: 1735

SEQ ID NO: 2736 - DNA, 305 bp, Homo sapiens; identical to SEQ ID NO: 1736

SEQ ID NO: 2737 - DNA, 448 bp, Homo sapiens; identical to SEQ ID NO: 1737
  misc_feature 409, 413: n = A,T,C or G

SEQ ID NO: 2738 - DNA, 511 bp, Homo sapiens; identical to SEQ ID NO: 1738
  misc_feature 19, 33, 35, 37, 44, 45, 48, 52, 54, 55, 57, 60, 79, 96, 129,179, 224, 249, 304, 338, 343, 350, 363, 372, 385, 419, 437,441, 455, 458, 459, 477, 481, 484, 494: n = A,T,C or G

SEQ ID NO: 2739 - DNA, 425 bp, Homo sapiens; identical to SEQ ID NO: 1739

SEQ ID NO: 2740 - DNA, 208 bp, Homo sapiens; identical to SEQ ID NO: 1740
  misc_feature 23: n = A,T,C or G

SEQ ID NO: 2741 - DNA, 256 bp, Homo sapiens; identical to SEQ ID NO: 1741

SEQ ID NO: 2742 - DNA, 438 bp, Homo sapiens; identical to SEQ ID NO: 1742
  misc_feature 321: n = A,T,C or G

SEQ ID NO: 2743 - DNA, 424 bp, Homo sapiens; identical to SEQ ID NO: 1743

SEQ ID NO: 2744 - DNA, 194 bp, Homo sapiens; identical to SEQ ID NO: 1744

SEQ ID NO: 2745 - DNA, 300 bp, Homo sapiens; identical to SEQ ID NO: 1745

SEQ ID NO: 2746 - DNA, 471 bp, Homo sapiens; identical to SEQ ID NO: 1746
  misc_feature 405, 407, 410, 419: n = A,T,C or G

SEQ ID NO: 2747 - DNA, 614 bp, Homo sapiens; identical to SEQ ID NO: 1747
  misc_feature 20, 38, 45, 46, 71, 142, 154, 204, 237, 244, 252, 310, 389,419, 440, 476, 504, 507, 526, 540, 549, 560, 564, 570, 581,586: n = A,T,C or G

SEQ ID NO: 2748 - DNA, 546 bp, Homo sapiens; identical to SEQ ID NO: 1748
  misc_feature 513: n = A,T,C or G

SEQ ID NO: 2749 - DNA, 474 bp, Homo sapiens; identical to SEQ ID NO: 1749
  misc_feature 366, 374, 386, 404, 429: n = A,T,C or G

SEQ ID NO: 2750 - DNA, 496 bp, Homo sapiens; identical to SEQ ID NO: 1750
  misc_feature 12, 44, 360, 385, 397, 403, 442, 454, 461, 478: n = A,T,C or G

SEQ ID NO: 2751 - DNA, 377 bp, Homo sapiens; identical to SEQ ID NO: 1751
  misc_feature 128, 268, 324: n = A,T,C or G

SEQ ID NO: 2752 - DNA, 245 bp, Homo sapiens; identical to SEQ ID NO: 1752

SEQ ID NO: 2753 - DNA, 721 bp, Homo sapiens; identical to SEQ ID NO: 1753
  misc_feature 16, 17, 30, 36, 41, 45, 51, 54, 60, 65, 68, 72, 79, 81, 82,93, 122, 123, 128, 131, 147, 159, 160, 165, 175, 177, 181,190, 195, 197, 213, 255, 257, 278, 281, 294, 322, 332, 594,630, 699: n = A,T,C or G

SEQ ID NO: 2754 - DNA, 345 bp, Homo sapiens; identical to SEQ ID NO: 1754
  misc_feature 43: n = A,T,C or G

SEQ ID NO: 2755 - DNA, 308 bp, Homo sapiens; identical to SEQ ID NO: 1755

SEQ ID NO: 2756 - DNA, 517 bp, Homo sapiens; identical to SEQ ID NO: 1756
  misc_feature 23, 26, 27, 31, 39, 488: n = A,T,C or G

SEQ ID NO: 2757 - DNA, 94 bp, Homo sapiens; identical to SEQ ID NO: 1757

SEQ ID NO: 2758 - DNA, 342 bp, Homo sapiens; identical to SEQ ID NO: 1758
  misc_feature 14, 24, 38, 39, 48, 50, 168, 179, 180, 183, 191, 195, 199: n = A,T,C or G

SEQ ID NO: 2759 - DNA, 520 bp, Homo sapiens; identical to SEQ ID NO: 1759
  misc_feature 14, 18, 19, 26, 35, 37, 45, 52, 55, 58, 61, 62, 63, 68, 69,102, 106, 117, 367, 379: n = A,T,C or G

SEQ ID NO: 2760 - DNA, 566 bp, Homo sapiens; identical to SEQ ID NO: 1760
  misc_feature 181: n = A,T,C or G

SEQ ID NO: 2761 - DNA, 334 bp, Homo sapiens; identical to SEQ ID NO: 1761

SEQ ID NO: 2762 - DNA, 338 bp, Homo sapiens; identical to SEQ ID NO: 1762
  misc_feature 14, 17: n = A,T,C or G

SEQ ID NO: 2763 - DNA, 432 bp, Homo sapiens; identical to SEQ ID NO: 1763

SEQ ID NO: 2764 - DNA, 255 bp, Homo sapiens; identical to SEQ ID NO: 1764

SEQ ID NO: 2765 - DNA, 428 bp, Homo sapiens; identical to SEQ ID NO: 1765
  misc_feature 25, 383, 395, 413: n = A,T,C or G

SEQ ID NO: 2766 - DNA, 286 bp, Homo sapiens; identical to SEQ ID NO: 1766

SEQ ID NO: 2767 - DNA, 285 bp, Homo sapiens; identical to SEQ ID NO: 1767

SEQ ID NO: 2768 - DNA, 326 bp, Homo sapiens; identical to SEQ ID NO: 1768

SEQ ID NO: 2769 - DNA, 362 bp, Homo sapiens; identical to SEQ ID NO: 1769

SEQ ID NO: 2770 - DNA, 105 bp, Homo sapiens; identical to SEQ ID NO: 1770

SEQ ID NO: 2771 - DNA, 548 bp, Homo sapiens; identical to SEQ ID NO: 1771
  misc_feature 294, 296, 297, 309, 312, 334, 351, 358, 362, 364, 370, 377,378, 380, 387, 389, 402, 409, 418, 430, 433, 439, 441, 442,453, 464, 465, 474, 483, 486, 489, 490, 504, 506, 508, 511,518, 519, 520, 524, 526, 532, 535: n = A,T,C or G

SEQ ID NO: 2772 - DNA, 358 bp, Homo sapiens; identical to SEQ ID NO: 1772
  misc_feature 25, 29: n = A,T,C or G

SEQ ID NO: 2773 - DNA, 183 bp, Homo sapiens; identical to SEQ ID NO: 1773
  misc_feature 4: n = A,T,C or G

SEQ ID NO: 2774 - DNA, 381 bp, Homo sapiens; identical to SEQ ID NO: 1774
  misc_feature 30, 31, 41, 55: n = A,T,C or G

SEQ ID NO: 2775 - DNA, 459 bp, Homo sapiens; identical to SEQ ID NO: 1775
  misc_feature 18, 19, 33, 114, 146, 157, 171, 178, 187: n = A,T,C or G

SEQ ID NO: 2776 - DNA, 281 bp, Homo sapiens; identical to SEQ ID NO: 1776
  misc_feature 29, 38, 44, 48, 49, 53, 65, 262: n = A,T,C or G

SEQ ID NO: 2777 - DNA, 252 bp, Homo sapiens; identical to SEQ ID NO: 1777

SEQ ID NO: 2778 - DNA, 380 bp, Homo sapiens; identical to SEQ ID NO: 1778
  misc_feature 304: n = A,T,C or G

SEQ ID NO: 2779 - DNA, 120 bp, Homo sapiens; identical to SEQ ID NO: 1779

SEQ ID NO: 2780 - DNA, 317 bp, Homo sapiens; identical to SEQ ID NO: 1780

SEQ ID NO: 2781 - DNA, 300 bp, Homo sapiens; identical to SEQ ID NO: 1781

SEQ ID NO: 2782 - DNA, 436 bp, Homo sapiens; identical to SEQ ID NO: 1782

SEQ ID NO: 2783 - DNA, 388 bp, Homo sapiens; identical to SEQ ID NO: 1783

SEQ ID NO: 2784 - DNA, 324 bp, Homo sapiens; identical to SEQ ID NO: 1784

SEQ ID NO: 2785 - DNA, 565 bp, Homo sapiens; identical to SEQ ID NO: 1785
  misc_feature 146, 158, 503, 515: n = A,T,C or G

SEQ ID NO: 2786 - DNA, 343 bp, Homo sapiens; identical to SEQ ID NO: 1786
  misc_feature 3, 9, 12, 14, 15, 16, 19, 24, 65, 161: n = A,T,C or G

SEQ ID NO: 2787 - DNA, 403 bp, Homo sapiens; identical to SEQ ID NO: 1787
  misc_feature 373, 376: n = A,T,C or G

SEQ ID NO: 2788 - DNA, 185 bp, Homo sapiens; identical to SEQ ID NO: 1788
  misc_feature 104: n = A,T,C or G

SEQ ID NO: 2789 - DNA, 231 bp, Homo sapiens; identical to SEQ ID NO: 1789

SEQ ID NO: 2790 - DNA, 153 bp, Homo sapiens; identical to SEQ ID NO: 1790
  misc_feature 58: n = A,T,C or G

SEQ ID NO: 2791 - DNA, 289 bp, Homo sapiens; identical to SEQ ID NO: 1791

SEQ ID NO: 2792 - DNA, 275 bp, Homo sapiens; identical to SEQ ID NO: 1792
  misc_feature 24, 29, 31, 35, 36, 37, 38, 54, 102, 103, 122, 124, 147,169, 181, 191, 197, 206, 215, 217, 237, 242, 243: n = A,T,C or G

SEQ ID NO: 2793 - DNA, 292 bp, Homo sapiens; identical to SEQ ID NO: 1793

SEQ ID NO: 2794 - DNA, 577 bp, Homo sapiens; identical to SEQ ID NO: 1794
  misc_feature 350, 415, 420, 483, 516, 534, 536, 554: n = A,T,C or G

SEQ ID NO: 2795 - DNA, 148 bp, Homo sapiens; identical to SEQ ID NO: 1795

SEQ ID NO: 2796 - DNA, 338 bp, Homo sapiens; identical to SEQ ID NO: 1796

SEQ ID NO: 2797 - DNA, 334 bp, Homo sapiens; identical to SEQ ID NO: 1797
  misc_feature 27, 32, 38, 51, 59, 65, 72, 73, 91, 100, 114, 117, 136, 141,146, 147, 176, 179, 193, 267: n = A,T,C or G

SEQ ID NO: 2798 - DNA, 448 bp, Homo sapiens; identical to SEQ ID NO: 1798
  misc_feature 1, 39, 45, 47, 62, 63, 69, 81, 117, 139, 152, 158, 174, 203,206, 251, 264, 358, 384, 389: n = A,T,C or G

SEQ ID NO: 2799 - DNA, 216 bp, Homo sapiens; identical to SEQ ID NO: 1799

SEQ ID NO: 2800 - DNA, 260 bp, Homo sapiens; identical to SEQ ID NO: 1800
  misc_feature 141, 154, 155, 176, 178, 179, 182, 185, 194, 196, 203, 205,209, 214, 215, 221, 226, 227, 232, 233, 241, 245: n = A,T,C or G

SEQ ID NO: 2801 - DNA, 520 bp, Homo sapiens; identical to SEQ ID NO: 1801
  misc_feature 234, 450, 500: n = A,T,C or G

SEQ ID NO: 2802 - DNA, 393 bp, Homo sapiens; identical to SEQ ID NO: 1802
  misc_feature 1, 2, 7, 29: n = A,T,C or G

SEQ ID NO: 2803 - DNA, 304 bp, Homo sapiens; identical to SEQ ID NO: 1803

SEQ ID NO: 2804 - DNA, 365 bp, Homo sapiens; identical to SEQ ID NO: 1804
  misc_feature 301, 326, 331, 345: n = A,T,C or G

SEQ ID NO: 2805 - DNA, 298 bp, Homo sapiens; identical to SEQ ID NO: 1805
  misc_feature 66, 78, 87, 92, 103, 107, 261, 269: n = A,T,C or G

SEQ ID NO: 2806 - DNA, 459 bp, Homo sapiens; identical to SEQ ID NO: 1806
  misc_feature 287, 376, 412: n = A,T,C or G

SEQ ID NO: 2807 - DNA, 585 bp, Homo sapiens; identical to SEQ ID NO: 1807
  misc_feature 376, 383, 466, 479, 503, 509, 535: n = A,T,C or G

SEQ ID NO: 2808 - DNA, 117 bp, Homo sapiens; identical to SEQ ID NO: 1808

SEQ ID NO: 2809 - DNA, 132 bp, Homo sapiens; identical to SEQ ID NO: 1809
  misc_feature 20: n = A,T,C or G

SEQ ID NO: 2810 - DNA, 263 bp, Homo sapiens; identical to SEQ ID NO: 1810

SEQ ID NO: 2811 - DNA, 362 bp, Homo sapiens; identical to SEQ ID NO: 1811

SEQ ID NO: 2812 - DNA, 141 bp, Homo sapiens; identical to SEQ ID NO: 1812

SEQ ID NO: 2813 - DNA, 508 bp, Homo sapiens; identical to SEQ ID NO: 1813
  misc_feature 450, 458, 480: n = A,T,C or G

SEQ ID NO: 2814 - DNA, 404 bp, Homo sapiens; identical to SEQ ID NO: 1814
  misc_feature 299, 331, 336, 342, 365: n = A,T,C or G

SEQ ID NO: 2815 - DNA, 237 bp, Homo sapiens; identical to SEQ ID NO: 1815

SEQ ID NO: 2816 - DNA, 218 bp, Homo sapiens; identical to SEQ ID NO: 1816

SEQ ID NO: 2817 - DNA, 226 bp, Homo sapiens; identical to SEQ ID NO: 1817
  misc_feature 191: n = A,T,C or G

SEQ ID NO: 2818 - DNA, 177 bp, Homo sapiens; identical to SEQ ID NO: 1818

SEQ ID NO: 2819 - DNA, 502 bp, Homo sapiens; identical to SEQ ID NO: 1819
  misc_feature 446: n = A,T,C or G

SEQ ID NO: 2820 - DNA, 229 bp, Homo sapiens; identical to SEQ ID NO: 1820

SEQ ID NO: 2821 - DNA, 297 bp, Homo sapiens; identical to SEQ ID NO: 1821

SEQ ID NO: 2822 - DNA, 282 bp, Homo sapiens; identical to SEQ ID NO: 1822

SEQ ID NO: 2823 - DNA, 269 bp, Homo sapiens; identical to SEQ ID NO: 1823

SEQ ID NO: 2824 - DNA, 174 bp, Homo sapiens; identical to SEQ ID NO: 1824
  misc_feature 141: n = A,T,C or G

SEQ ID NO: 2825 - DNA, 405 bp, Homo sapiens; identical to SEQ ID NO: 1825

SEQ ID NO: 2826 - DNA, 434 bp, Homo sapiens; identical to SEQ ID NO: 1826
  misc_feature 389: n = A,T,C or G

SEQ ID NO: 2827 - DNA, 167 bp, Homo sapiens; identical to SEQ ID NO: 1827

SEQ ID NO: 2828 - DNA, 254 bp, Homo sapiens; identical to SEQ ID NO: 1828

SEQ ID NO: 2829 - DNA, 422 bp, Homo sapiens; identical to SEQ ID NO: 1829
  misc_feature 387, 389, 396, 402: n = A,T,C or G

SEQ ID NO: 2830 - DNA, 327 bp, Homo sapiens; identical to SEQ ID NO: 1830
  misc_feature 17, 19: n = A,T,C or G

SEQ ID NO: 2831 - DNA, 460 bp, Homo sapiens; identical to SEQ ID NO: 1831
  misc_feature 428, 430, 437, 440, 442: n = A,T,C or G

SEQ ID NO: 2832 - DNA, 305 bp, Homo sapiens; identical to SEQ ID NO: 1832
  misc_feature 92: n = A,T,C or G

SEQ ID NO: 2833 - DNA, 174 bp, Homo sapiens; identical to SEQ ID NO: 1833

SEQ ID NO: 2834 - DNA, 98 bp, Homo sapiens; identical to SEQ ID NO: 1834
  misc_feature 21, 44, 51, 67, 70, 85: n = A,T,C or G

SEQ ID NO: 2835 - DNA, 291 bp, Homo sapiens; identical to SEQ ID NO: 1835

SEQ ID NO: 2836 - DNA, 271 bp, Homo sapiens; identical to SEQ ID NO: 1836
  misc_feature 65, 69, 81, 83, 94, 95, 102, 118, 171, 204, 229, 230, 232,235, 242, 250, 252, 257: n = A,T,C or G

SEQ ID NO: 2837 - DNA, 285 bp, Homo sapiens; identical to SEQ ID NO: 1837
  misc_feature 18, 21, 24, 36, 56: n = A,T,C or G

SEQ ID NO: 2838 - DNA, 400 bp, Homo sapiens; identical to SEQ ID NO: 1838
  misc_feature 355: n = A,T,C or G

SEQ ID NO: 2839 - DNA, 459 bp, Homo sapiens; identical to SEQ ID NO: 1839
  misc_feature 27, 47, 53, 72, 77, 83, 95, 133, 155, 168, 180, 198, 212,246, 411, 417, 420, 427, 445: n = A,T,C or G

SEQ ID NO: 2840 - DNA, 423 bp, Homo sapiens; identical to SEQ ID NO: 1840
  misc_feature 368, 370, 379, 407, 409: n = A,T,C or G

SEQ ID NO: 2841 - DNA, 238 bp, Homo sapiens; identical to SEQ ID NO: 1841

SEQ ID NO: 2842 - DNA, 151 bp, Homo sapiens; identical to SEQ ID NO: 1842

SEQ ID NO: 2843 - DNA, 423 bp, Homo sapiens; identical to SEQ ID NO: 1843
  misc_feature 82, 380, 399: n = A,T,C or G

SEQ ID NO: 2844 - DNA, 456 bp, Homo sapiens; identical to SEQ ID NO: 1844
  misc_feature 276, 336, 360, 377, 398, 402, 411, 413, 435, 442: n = A,T,C or G

SEQ ID NO: 2845 - DNA, 249 bp, Homo sapiens; identical to SEQ ID NO: 1845

SEQ ID NO: 2846 - DNA, 205 bp, Homo sapiens; identical to SEQ ID NO: 1846

SEQ ID NO: 2847 - DNA, 458 bp, Homo sapiens; identical to SEQ ID NO: 1847
  misc_feature 14, 19, 20, 33, 43, 57, 62, 78, 80, 87, 101, 103, 141, 145,156, 258, 268, 284, 288, 317, 319, 330, 355, 358, 395, 398,401, 422, 429, 430: n = A,T,C or G

SEQ ID NO: 2848 - DNA, 285 bp, Homo sapiens; identical to SEQ ID NO: 1848

SEQ ID NO: 2849 - DNA, 448 bp, Homo sapiens; identical to SEQ ID NO: 1849
  misc_feature 378, 387: n = A,T,C or G

SEQ ID NO: 2850 - DNA, 360 bp, Homo sapiens; identical to SEQ ID NO: 1850
  misc_feature 20, 22, 35, 120, 151, 163, 184: n = A,T,C or G

SEQ ID NO: 2851 - DNA, 387 bp, Homo sapiens; identical to SEQ ID NO: 1851
  misc_feature 9, 357, 359, 364: n = A,T,C or G

SEQ ID NO: 2852 - DNA, 418 bp, Homo sapiens; identical to SEQ ID NO: 1852
  misc_feature 7, 16, 25, 30, 31, 32, 34, 37, 44, 57, 80, 84, 91, 99, 131,149, 181, 188, 193, 214, 234, 307, 308: n = A,T,C or G

SEQ ID NO: 2853 - DNA, 363 bp, Homo sapiens; identical to SEQ ID NO: 1853
  misc_feature 332: n = A,T,C or G

SEQ ID NO: 2854 - DNA, 332 bp, Homo sapiens; identical to SEQ ID NO: 1854

SEQ ID NO: 2855 - DNA, 394 bp, Homo sapiens; identical to SEQ ID NO: 1855

SEQ ID NO: 2856 - DNA, 373 bp, Homo sapiens; identical to SEQ ID NO: 1856
  misc_feature 350, 354: n = A,T,C or G

SEQ ID NO: 2857 - DNA, 431 bp, Homo sapiens; identical to SEQ ID NO: 1857
  misc_feature 393, 395: n = A,T,C or G

SEQ ID NO: 2858 - DNA, 253 bp, Homo sapiens; identical to SEQ ID NO: 1858

SEQ ID NO: 2859 - DNA, 403 bp, Homo sapiens; identical to SEQ ID NO: 1859
  misc_feature 161, 165, 176, 181, 185, 189, 190, 194, 196, 197, 204, 205,208, 217, 224, 234, 241, 243, 250, 261, 266, 280, 301, 310,311, 312, 344, 351, 365, 375, 389, 390: n = A,T,C or G

SEQ ID NO: 2860 - DNA, 132 bp, Homo sapiens; identical to SEQ ID NO: 1860

SEQ ID NO: 2861 - DNA, 435 bp, Homo sapiens; identical to SEQ ID NO: 1861
  misc_feature 9, 322, 352, 364: n = A,T,C or G

SEQ ID NO: 2862 - DNA, 330 bp, Homo sapiens; identical to SEQ ID NO: 1862
  misc_feature 11, 31, 35, 39, 44, 56, 59, 74, 75: n = A,T,C or G

SEQ ID NO: 2863 - DNA, 351 bp, Homo sapiens; identical to SEQ ID NO: 1863

SEQ ID NO: 2864 - DNA, 271 bp, Homo sapiens; identical to SEQ ID NO: 1864

SEQ ID NO: 2865 - DNA, 303 bp, Homo sapiens; identical to SEQ ID NO: 1865

SEQ ID NO: 2866 - DNA, 185 bp, Homo sapiens; identical to SEQ ID NO: 1866

SEQ ID NO: 2867 - DNA, 294 bp, Homo sapiens; identical to SEQ ID NO: 1867

SEQ ID NO: 2868 - DNA, 512 bp, Homo sapiens; identical to SEQ ID NO: 1868
  misc_feature 307, 441, 455: n = A,T,C or G

SEQ ID NO: 2869 - DNA, 231 bp, Homo sapiens; identical to SEQ ID NO: 1869
  misc_feature 4, 8, 12, 19, 52, 56, 62, 67, 68, 82, 91, 95, 99, 101, 107,109, 111, 149, 156: n = A,T,C or G

SEQ ID NO: 2870 - DNA, 262 bp, Homo sapiens; identical to SEQ ID NO: 1870
  misc_feature 206, 210, 212, 226, 241, 249: n = A,T,C or G

SEQ ID NO: 2871 - DNA, 638 bp, Homo sapiens; identical to SEQ ID NO: 1871
  misc_feature 398, 498, 533, 548, 565, 574, 578, 609, 623: n = A,T,C or G

SEQ ID NO: 2872 - DNA, 432 bp, Homo sapiens; identical to SEQ ID NO: 1872

SEQ ID NO: 2873 - DNA, 410 bp, Homo sapiens; identical to SEQ ID NO: 1873

SEQ ID NO: 2874 - DNA, 195 bp, Homo sapiens; identical to SEQ ID NO: 1874
  misc_feature 25, 39, 41, 62, 72, 94, 122, 145, 158, 179, 180, 181: n = A,T,C or G

SEQ ID NO: 2875 - DNA, 241 bp, Homo sapiens; identical to SEQ ID NO: 1875
  misc_feature 95: n = A,T,C or G

SEQ ID NO: 2876 - DNA, 357 bp, Homo sapiens; identical to SEQ ID NO: 1876
  misc_feature 3, 19, 21, 25, 35, 38, 39, 41, 54, 55, 92, 108, 156, 172,173, 189, 193, 210, 297, 310: n = A,T,C or G

SEQ ID NO: 2877 - DNA, 329 bp, Homo sapiens; identical to SEQ ID NO: 1877
  misc_feature 18: n = A,T,C or G

SEQ ID NO: 2878 - DNA, 443 bp, Homo sapiens; identical to SEQ ID NO: 1878
  misc_feature 396, 398, 410: n = A,T,C or G

SEQ ID NO: 2879 - DNA, 460 bp, Homo sapiens; identical to SEQ ID NO: 1879

SEQ ID NO: 2880 - DNA, 426 bp, Homo sapiens; identical to SEQ ID NO: 1880

SEQ ID NO: 2881 - DNA, 250 bp, Homo sapiens; identical to SEQ ID NO: 1881
  misc_feature 192, 194, 195, 196, 198, 201, 207, 226, 234, 235: n = A,T,C or G

SEQ ID NO: 2882 - DNA, 165 bp, Homo sapiens; identical to SEQ ID NO: 1882
  misc_feature 9, 11, 13, 27, 55, 56, 58, 62, 69, 70: n = A,T,C or G

SEQ ID NO: 2883 - DNA, 397 bp, Homo sapiens; identical to SEQ ID NO: 1883
  misc_feature 31, 32, 38, 43, 47, 48, 55, 60, 62, 112, 119, 356: n = A,T,C or G

SEQ ID NO: 2884 - DNA, 232 bp, Homo sapiens; identical to SEQ ID NO: 1884
  misc_feature 209: n = A,T,C or G

SEQ ID NO: 2885 - DNA, 167 bp, Homo sapiens; identical to SEQ ID NO: 1885

SEQ ID NO: 2886 - DNA, 187 bp, Homo sapiens; identical to SEQ ID NO: 1886

SEQ ID NO: 2887 - DNA, 282 bp, Homo sapiens; identical to SEQ ID NO: 1887

SEQ ID NO: 2888 - DNA, 146 bp, Homo sapiens; identical to SEQ ID NO: 1888

SEQ ID NO: 2889 - DNA, 190 bp, Homo sapiens; identical to SEQ ID NO: 1889

SEQ ID NO: 2890 - DNA, 303 bp, Homo sapiens; identical to SEQ ID NO: 1890

SEQ ID NO: 2891 - DNA, 117 bp, Homo sapiens; identical to SEQ ID NO: 1891

SEQ ID NO: 2892 - DNA, 244 bp, Homo sapiens; identical to SEQ ID NO: 1892

SEQ ID NO: 2893 - DNA, 168 bp, Homo sapiens; identical to SEQ ID NO: 1893
  misc_feature 5: n = A,T,C or G

SEQ ID NO: 2894 - DNA, 477 bp, Homo sapiens; identical to SEQ ID NO: 1894
  misc_feature 24, 27, 34, 40, 41, 48, 50, 53, 56, 59, 61, 67, 69, 74, 76,77, 81, 85, 131, 247, 329: n = A,T,C or G

SEQ ID NO: 2895 - DNA, 261 bp, Homo sapiens; identical to SEQ ID NO: 1895
  misc_feature 43, 49, 66, 67, 77, 79, 83, 107, 161, 162, 167, 226, 232,241: n = A,T,C or G

SEQ ID NO: 2896 - DNA, 139 bp, Homo sapiens; identical to SEQ ID NO: 1896

SEQ ID NO: 2897 - DNA, 415 bp, Homo sapiens; identical to SEQ ID NO: 1897

SEQ ID NO: 2898 - DNA, 360 bp, Homo sapiens; identical to SEQ ID NO: 1898

SEQ ID NO: 2899 - DNA, 433 bp, Homo sapiens; identical to SEQ ID NO: 1899
  misc_feature 416: n = A,T,C or G

SEQ ID NO: 2900 - DNA, 385 bp, Homo sapiens; identical to SEQ ID NO: 1900
  misc_feature 37, 216, 285, 308, 311, 361: n = A,T,C or G

SEQ ID NO: 2901 - DNA, 416 bp, Homo sapiens; identical to SEQ ID NO: 1901

SEQ ID NO: 2902 - DNA, 256 bp, Homo sapiens; identical to SEQ ID NO: 1902

SEQ ID NO: 2903 - DNA, 558 bp, Homo sapiens; identical to SEQ ID NO: 1903
  misc_feature 16, 18, 19, 20, 41, 44, 46, 54, 56, 61, 73, 81, 83, 93, 96,98, 108, 110, 112, 115, 120, 122, 143, 149, 158, 162, 233,242, 252, 262, 276, 296, 376, 383, 400, 403, 452, 457, 469,494, 543: n = A,T,C or G

SEQ ID NO: 2904 - DNA, 419 bp, Homo sapiens; identical to SEQ ID NO: 1904

SEQ ID NO: 2905 - DNA, 447 bp, Homo sapiens; identical to SEQ ID NO: 1905
  misc_feature 14, 16, 73, 290, 296, 299, 313, 359, 394, 398, 401, 434: n = A,T,C or G

SEQ ID NO: 2906 - DNA, 167 bp, Homo sapiens; identical to SEQ ID NO: 1906
  misc_feature 24, 28, 38, 45, 63, 123: n = A,T,C or G

SEQ ID NO: 2907 - DNA, 255 bp, Homo sapiens; identical to SEQ ID NO: 1907

SEQ ID NO: 2908 - DNA, 111 bp, Homo sapiens; identical to SEQ ID NO: 1908
  misc_feature 2: n = A,T,C or G

SEQ ID NO: 2909 - DNA, 561 bp, Homo sapiens; identical to SEQ ID NO: 1909
  misc_feature 3, 4, 7, 9, 23, 86, 88, 93, 105, 234, 450, 480: n = A,T,C or G

SEQ ID NO: 2910 - DNA, 569 bp, Homo sapiens; identical to SEQ ID NO: 1910
  misc_feature 476, 545, 551: n = A,T,C or G

SEQ ID NO: 2911 - DNA, 433 bp, Homo sapiens; identical to SEQ ID NO: 1911
  misc_feature 11, 12, 18, 20, 21, 37, 43, 55, 142, 199, 216, 332: n = A,T,C or G

SEQ ID NO: 2912 - DNA, 265 bp, Homo sapiens; identical to SEQ ID NO: 1912

SEQ ID NO: 2913 - DNA, 501 bp, Homo sapiens; identical to SEQ ID NO: 1913
  misc_feature 5, 15, 16, 21, 29, 31, 36, 37, 44, 50, 112, 169: n = A,T,C or G

SEQ ID NO: 2914 - DNA, 324 bp, Homo sapiens; identical to SEQ ID NO: 1914

SEQ ID NO: 2915 - DNA, 433 bp, Homo sapiens; identical to SEQ ID NO: 1915
  misc_feature 19, 25, 38, 45, 379, 395, 403: n = A,T,C or G

SEQ ID NO: 2916 - DNA, 449 bp, Homo sapiens; identical to SEQ ID NO: 1916
  misc_feature 2, 7, 10, 16, 17, 20, 34, 36, 44, 51, 56, 79, 90, 93, 157,171, 185, 211, 216, 223, 224, 231: n = A,T,C or G

SEQ ID NO: 2917 - DNA, 308 bp, Homo sapiens; identical to SEQ ID NO: 1917

SEQ ID NO: 2918 - DNA, 327 bp, Homo sapiens; identical to SEQ ID NO: 1918

SEQ ID NO: 2919 - DNA, 284 bp, Homo sapiens; identical to SEQ ID NO: 1919

SEQ ID NO: 2920 - DNA, 464 bp, Homo sapiens; identical to SEQ ID NO: 1920
  misc_feature 31, 33, 76, 86, 132, 165, 186, 280: n = A,T,C or G

SEQ ID NO: 2921 - DNA, 317 bp, Homo sapiens; identical to SEQ ID NO: 1921
  misc_feature 28, 39, 55, 59, 61, 69, 71, 72, 83, 95, 195: n = A,T,C or G

SEQ ID NO: 2922 - DNA, 259 bp, Homo sapiens; identical to SEQ ID NO: 1922
  misc_feature 29, 38, 41, 42, 49, 50, 51, 52, 53, 56, 59, 60, 62, 63, 64,66, 68, 69, 72, 81, 89, 92: n = A,T,C or G

SEQ ID NO: 2923 - DNA, 403 bp, Homo sapiens; identical to SEQ ID NO: 1923
  misc_feature 33, 44, 45, 52, 60, 61, 72, 76, 79, 92, 212, 327, 342, 344,353, 356, 359, 367, 369, 376, 383: n = A,T,C or G

SEQ ID NO: 2924 - DNA, 376 bp, Homo sapiens; identical to SEQ ID NO: 1924

SEQ ID NO: 2925 - DNA, 394 bp, Homo sapiens; identical to SEQ ID NO: 1925
  misc_feature 12, 16, 28, 31, 43, 46, 73, 88, 102, 116, 125, 197, 273,292, 298, 309, 311, 330, 343: n = A,T,C or G

SEQ ID NO: 2926 - DNA, 343 bp, Homo sapiens; identical to SEQ ID NO: 1926

SEQ ID NO: 2927 - DNA, 373 bp, Homo sapiens; identical to SEQ ID NO: 1927
  misc_feature 26, 27, 37, 41, 42, 43, 49, 51, 52, 55, 59, 65, 72, 82, 83,90, 96, 110, 114, 119, 150, 155: n = A,T,C or G

SEQ ID NO: 2928 - DNA, 386 bp, Homo sapiens; identical to SEQ ID NO: 1928

SEQ ID NO: 2929 - DNA, 267 bp, Homo sapiens; identical to SEQ ID NO: 1929
  misc_feature 39, 228: n = A,T,C or G

SEQ ID NO: 2930 - DNA, 243 bp, Homo sapiens; identical to SEQ ID NO: 1930
  misc_feature 67, 196, 200, 204, 205, 207, 220, 224, 227: n = A,T,C or G

SEQ ID NO: 2931 - DNA, 307 bp, Homo sapiens; identical to SEQ ID NO: 1931

SEQ ID NO: 2932 - DNA, 332 bp, Homo sapiens; identical to SEQ ID NO: 1932

SEQ ID NO: 2933 - DNA, 392 bp, Homo sapiens; identical to SEQ ID NO: 1933

SEQ ID NO: 2934 - DNA, 351 bp, Homo sapiens; identical to SEQ ID NO: 1934
  misc_feature 1, 4, 8, 24, 29, 33, 34, 38, 46, 51, 52, 56, 57, 66, 76,80, 86, 110, 120, 133, 137, 152, 166, 170: n = A,T,C or G

SEQ ID NO: 2935 - DNA, 396 bp, Homo sapiens; identical to SEQ ID NO: 1935
  misc_feature 13, 31, 62, 85, 89, 103, 151, 160, 167, 202, 203, 217, 221,244: n = A,T,C or G

SEQ ID NO: 2936 - DNA, 350 bp, Homo sapiens; identical to SEQ ID NO: 1936

SEQ ID NO: 2937 - DNA, 374 bp, Homo sapiens; identical to SEQ ID NO: 1937
  misc_feature 2, 7, 17, 19, 56, 58, 60, 71, 84, 85, 89, 91, 102, 119, 135,144, 161, 197, 230, 249, 269, 273, 318, 322, 340, 354, 355: n = A,T,C or G

SEQ ID NO: 2938 - DNA, 153 bp, Homo sapiens; identical to SEQ ID NO: 1938

SEQ ID NO: 2939 - DNA, 77 bp, Homo sapiens; identical to SEQ ID NO: 1939

SEQ ID NO: 2940 - DNA, 430 bp, Homo sapiens; identical to SEQ ID NO: 1940

SEQ ID NO: 2941 - DNA, 337 bp, Homo sapiens; identical to SEQ ID NO: 1941

SEQ ID NO: 2942 - DNA, 266 bp, Homo sapiens; identical to SEQ ID NO: 1942
  misc_feature 14, 17, 18, 19, 20, 27, 62, 150: n = A,T,C or G

SEQ ID NO: 2943 - DNA, 443 bp, Homo sapiens; identical to SEQ ID NO: 1943
  misc_feature 375, 377, 378, 379, 381, 390, 393, 410, 418: n = A,T,C or G

SEQ ID NO: 2944 - DNA, 514 bp, Homo sapiens; identical to SEQ ID NO: 1944
  misc_feature 450: n = A,T,C or G

SEQ ID NO: 2945 - DNA, 239 bp, Homo sapiens; identical to SEQ ID NO: 1945

SEQ ID NO: 2946 - DNA, 503 bp, Homo sapiens; identical to SEQ ID NO: 1946

SEQ ID NO: 2947 - DNA, 215 bp, Homo sapiens; identical to SEQ ID NO: 1947

SEQ ID NO: 2948 - DNA, 418 bp, Homo sapiens; identical to SEQ ID NO: 1948
  misc_feature 122, 132, 180, 183, 217, 377: n = A,T,C or G

SEQ ID NO: 2949 - DNA, 196 bp, Homo sapiens; identical to SEQ ID NO: 1949

SEQ ID NO: 2950 - DNA, 137 bp, Homo sapiens; identical to SEQ ID NO: 1950

SEQ ID NO: 2951 - DNA, 430 bp, Homo sapiens; identical to SEQ ID NO: 1951
  misc_feature 345, 368, 372, 411, 414: n = A,T,C or G

SEQ ID NO: 2952 - DNA, 211 bp, Homo sapiens; identical to SEQ ID NO: 1952

SEQ ID NO: 2953 - DNA, 424 bp, Homo sapiens; identical to SEQ ID NO: 1953
  misc_feature 363, 378: n = A,T,C or G

SEQ ID NO: 2954 - DNA, 190 bp, Homo sapiens; identical to SEQ ID NO: 1954

SEQ ID NO: 2955 - DNA, 370 bp, Homo sapiens; identical to SEQ ID NO: 1955
  misc_feature 16, 17, 51, 130, 132, 323, 325: n = A,T,C or G

SEQ ID NO: 2956 - DNA, 161 bp, Homo sapiens; identical to SEQ ID NO: 1956

SEQ ID NO: 2957 - DNA, 425 bp, Homo sapiens; identical to SEQ ID NO: 1957
  misc_feature 388, 394: n = A,T,C or G

SEQ ID NO: 2958 - DNA, 268 bp, Homo sapiens; identical to SEQ ID NO: 1958
  misc_feature 21, 49, 55, 150, 189, 227, 235: n = A,T,C or G

SEQ ID NO: 2959 - DNA, 287 bp, Homo sapiens; identical to SEQ ID NO: 1959
  misc_feature 251, 252: n = A,T,C or G

SEQ ID NO: 2960 - DNA, 236 bp, Homo sapiens; identical to SEQ ID NO: 1960
  misc_feature 88: n = A,T,C or G

SEQ ID NO: 2961 - DNA, 283 bp, Homo sapiens; identical to SEQ ID NO: 1961

SEQ ID NO: 2962 - DNA, 256 bp, Homo sapiens; identical to SEQ ID NO: 1962

SEQ ID NO: 2963 - DNA, 457 bp, Homo sapiens; identical to SEQ ID NO: 1963
  misc_feature 353, 357, 359, 362, 387, 397, 403, 439: n = A,T,C or G

SEQ ID NO: 2964 - DNA, 290 bp, Homo sapiens; identical to SEQ ID NO: 1964
  misc_feature 19, 27, 36, 51, 78, 86, 105, 112, 158, 161, 181, 270: n = A,T,C or G

SEQ ID NO: 2965 - DNA, 435 bp, Homo sapiens; identical to SEQ ID NO: 1965
  misc_feature 355, 380, 393, 401, 412, 422: n = A,T,C or G

SEQ ID NO: 2966 - DNA, 191 bp, Homo sapiens; identical to SEQ ID NO: 1966

SEQ ID NO: 2967 - DNA, 307 bp, Homo sapiens; identical to SEQ ID NO: 1967

SEQ ID NO: 2968 - DNA, 593 bp, Homo sapiens; identical to SEQ ID NO: 1968
  misc_feature 6, 15, 20, 33, 54, 199, 269, 336, 474, 502, 507, 510, 511,525, 536, 545, 553, 564, 570, 577, 579: n = A,T,C or G

SEQ ID NO: 2969 - DNA, 676 bp, Homo sapiens; identical to SEQ ID NO: 1969
  misc_feature 3, 10, 11, 16, 23, 32, 35, 43, 47, 49, 50, 52, 61, 62, 66,67, 75, 77, 86, 119, 122, 134, 139, 142, 165, 178, 340,529, 533, 536, 549, 557, 565, 568, 571, 579, 596, 647: n = A,T,C or G

SEQ ID NO: 2970 - DNA, 421 bp, Homo sapiens; identical to SEQ ID NO: 1970
  misc_feature 9, 12, 18, 25, 26, 29, 51, 54, 58, 66, 87, 148, 175, 177,183, 206, 223, 230, 263, 266, 283, 286, 287, 326, 334, 337,343, 344, 381, 384, 402: n = A,T,C or G

SEQ ID NO: 2971 - DNA, 249 bp, Homo sapiens; identical to SEQ ID NO: 1971

SEQ ID NO: 2972 - DNA, 452 bp, Homo sapiens; identical to SEQ ID NO: 1972
  misc_feature 8, 13: n = A,T,C or G

SEQ ID NO: 2973 - DNA, 276 bp, Homo sapiens; identical to SEQ ID NO: 1973
  misc_feature 1, 5, 13, 14, 15, 22, 26, 28, 33, 36, 43, 50, 90, 101: n = A,T,C or G

SEQ ID NO: 2974 - DNA, 300 bp, Homo sapiens; identical to SEQ ID NO: 1974
  misc_feature 172, 217: n = A,T,C or G

SEQ ID NO: 2975 - DNA, 432 bp, Homo sapiens; identical to SEQ ID NO: 1975
  misc_feature 16, 21, 24, 36, 47, 52, 57, 62, 72, 78, 82, 90, 93, 124,150, 157, 167, 188, 316, 373, 393, 415, 417: n = A,T,C or G

SEQ ID NO: 2976 - DNA, 441 bp, Homo sapiens; identical to SEQ ID NO: 1976
  misc_feature 334, 402: n = A,T,C or G

SEQ ID NO: 2977 - DNA, 304 bp, Homo sapiens; identical to SEQ ID NO: 1977
  misc_feature 2, 4, 5, 14, 18, 19: n = A,T,C or G

SEQ ID NO: 2978 - DNA, 423 bp, Homo sapiens; identical to SEQ ID NO: 1978
  misc_feature 30, 371, 372, 373, 374, 375, 376, 377, 378, 379, 380, 381,382, 383, 384, 385, 386, 387, 388, 389, 390, 391, 397, 404: n = A,T,C or G

SEQ ID NO: 2979 - DNA, 402 bp, Homo sapiens; identical to SEQ ID NO: 1979
  misc_feature 22, 24, 25, 31, 32, 33, 39, 44, 50, 51, 66, 67, 71, 75, 77,81, 89, 97, 100, 115: n = A,T,C or G

SEQ ID NO: 2980 - DNA, 497 bp, Homo sapiens; identical to SEQ ID NO: 1980
  misc_feature 446: n = A,T,C or G

SEQ ID NO: 2981 - DNA, 526 bp, Homo sapiens; identical to SEQ ID NO: 1981
  misc_feature 276, 403, 408, 435, 436, 437, 438, 439, 440, 441, 442, 443,444, 445, 446, 447, 448, 449, 450, 451, 452, 453, 454, 455,456, 457, 458, 465, 467, 475, 478, 479, 501, 508, 512: n = A,T,C or G

SEQ ID NO: 2982 - DNA, 513 bp, Homo sapiens; identical to SEQ ID NO: 1982
  misc_feature 421, 433, 437, 475, 480, 481: n = A,T,C or G

SEQ ID NO: 2983 - DNA, 436 bp, Homo sapiens; identical to SEQ ID NO: 1983
  misc_feature 390, 394, 396, 397, 403, 410, 413, 415: n = A,T,C or G

SEQ ID NO: 2984 - DNA, 90 bp, Homo sapiens; identical to SEQ ID NO: 1984
  misc_feature 35, 37, 38: n = A,T,C or G

SEQ ID NO: 2985 - DNA, 515 bp, Homo sapiens; identical to SEQ ID NO: 1985
  misc_feature 444, 472: n = A,T,C or G

SEQ ID NO: 2986 - DNA, 528 bp, Homo sapiens; identical to SEQ ID NO: 1986
  misc_feature 132, 412, 515: n = A,T,C or G

SEQ ID NO: 2987 - DNA, 537 bp, Homo sapiens; identical to SEQ ID NO: 1987
  misc_feature 333, 415, 473, 476, 511, 522: n = A,T,C or G

SEQ ID NO: 2988 - DNA, 367 bp, Homo sapiens; identical to SEQ ID NO: 1988
  misc_feature 18, 164, 170, 353: n = A,T,C or G

SEQ ID NO: 2989 - DNA, 189 bp, Homo sapiens; identical to SEQ ID NO: 1989

SEQ ID NO: 2990 - DNA, 157 bp, Homo sapiens; identical to SEQ ID NO: 1990

SEQ ID NO: 2991 - DNA, 416 bp, Homo sapiens; identical to SEQ ID NO: 1991
  misc_feature 363: n = A,T,C or G

SEQ ID NO: 2992 - DNA, 395 bp, Homo sapiens; identical to SEQ ID NO: 1992
  misc_feature 301, 322, 345, 348, 353: n = A,T,C or G

SEQ ID NO: 2993 - DNA, 429 bp, Homo sapiens; identical to SEQ ID NO: 1993
  misc_feature 386: n = A,T,C or G

SEQ ID NO: 2994 - DNA, 345 bp, Homo sapiens; identical to SEQ ID NO: 1994

SEQ ID NO: 2995 - DNA, 388 bp, Homo sapiens; identical to SEQ ID NO: 1995

SEQ ID NO: 2996 - DNA, 310 bp, Homo sapiens; identical to SEQ ID NO: 1996

SEQ ID NO: 2997 - DNA, 455 bp, Homo sapiens; identical to SEQ ID NO: 1997
  misc_feature 371, 407: n = A,T,C or G

SEQ ID NO: 2998 - DNA, 397 bp, Homo sapiens; identical to SEQ ID NO: 1998

SEQ ID NO: 2999 - DNA, 443 bp, Homo sapiens; identical to SEQ ID NO: 1999
  misc_feature 382, 401: n = A,T,C or G

SEQ ID NO: 3000 - DNA, 346 bp, Homo sapiens; identical to SEQ ID NO: 2000
  misc_feature 307: n = A,T,C or G

SEQ ID NO: 3001 - DNA, 444 bp, Homo sapiens; identical to SEQ ID NO: 2001
  misc_feature 405, 426: n = A,T,C or G

SEQ ID NO: 3002 - DNA, 401 bp, Homo sapiens; identical to SEQ ID NO: 2002
  misc_feature 336, 338, 340, 342, 345, 354, 356, 367, 370, 379, 381: n = A,T,C or G

SEQ ID NO: 3003 - DNA, 306 bp, Homo sapiens; identical to SEQ ID NO: 2003

SEQ ID NO: 3004 - DNA, 224 bp, Homo sapiens; identical to SEQ ID NO: 2004

SEQ ID NO: 3005 - DNA, 318 bp, Homo sapiens; identical to SEQ ID NO: 2005

SEQ ID NO: 3006 - DNA, 133 bp, Homo sapiens; identical to SEQ ID NO: 2006
  misc_feature 12, 13, 16, 17, 39: n = A,T,C or G

SEQ ID NO: 3007 - DNA, 114 bp, Homo sapiens; identical to SEQ ID NO: 2007
  misc_feature 22, 29, 33, 37, 44, 64: n = A,T,C or G

SEQ ID NO: 3008 - DNA, 409 bp, Homo sapiens; identical to SEQ ID NO: 2008
  misc_feature 7, 37, 78, 127, 169, 223, 229, 233, 289, 335, 342, 363, 374,376, 392, 394: n = A,T,C or G

SEQ ID NO: 3009 - DNA, 411 bp, Homo sapiens; identical to SEQ ID NO: 2009
  misc_feature 81, 141, 149, 190, 276, 306, 333, 348, 350, 354, 358, 360,364, 366, 367, 368, 369, 372, 373, 377, 380, 388, 389, 390,394, 398: n = A,T,C or G

SEQ ID NO: 3010 - DNA, 165 bp, Homo sapiens; identical to SEQ ID NO: 2010

SEQ ID NO: 3011 - DNA, 461 bp, Homo sapiens; identical to SEQ ID NO: 2011
  misc_feature 423, 425, 437, 439, 441, 447: n = A,T,C or G

SEQ ID NO: 3012 - DNA, 475 bp, Homo sapiens; identical to SEQ ID NO: 2012

SEQ ID NO: 3013 - DNA, 371 bp, Homo sapiens; identical to SEQ ID NO: 2013

SEQ ID NO: 3014 - DNA, 216 bp, Homo sapiens; identical to SEQ ID NO: 2014

SEQ ID NO: 3015 - DNA, 483 bp, Homo sapiens; identical to SEQ ID NO: 2015

SEQ ID NO: 3016 - DNA, 233 bp, Homo sapiens; identical to SEQ ID NO: 2016

SEQ ID NO: 3017 - DNA, 366 bp, Homo sapiens; identical to SEQ ID NO: 2017

SEQ ID NO: 3018 - DNA, 368 bp, Homo sapiens; identical to SEQ ID NO: 2018

SEQ ID NO: 3019 - DNA, 487 bp, Homo sapiens; identical to SEQ ID NO: 2019
  misc_feature 461: n = A,T,C or G

SEQ ID NO: 3020 - DNA, 325 bp, Homo sapiens; identical to SEQ ID NO: 2020
  misc_feature 15, 17, 21, 23, 36, 39, 68, 71, 107, 125, 127, 128, 240,244, 254: n = A,T,C or G

SEQ ID NO: 3021 - DNA, 495 bp, Homo sapiens; identical to SEQ ID NO: 2021
  misc_feature 11, 423, 429, 436, 438, 472: n = A,T,C or G

SEQ ID NO: 3022 - DNA, 355 bp, Homo sapiens; identical to SEQ ID NO: 2022
  misc_feature 10, 17, 18, 23, 46, 65, 80: n = A,T,C or G

SEQ ID NO: 3023 - DNA, 521 bp, Homo sapiens; identical to SEQ ID NO: 2023
  misc_feature 422, 493: n = A,T,C or G

SEQ ID NO: 3024 - DNA, 510 bp, Homo sapiens; identical to SEQ ID NO: 2024
  misc_feature 1, 3, 7, 395, 454, 477, 496: n = A,T,C or G

SEQ ID NO: 3025 - DNA, 504 bp, Homo sapiens; identical to SEQ ID NO: 2025
  misc_feature 433, 442, 477: n = A,T,C or G

SEQ ID NO: 3026 - DNA, 513 bp, Homo sapiens; identical to SEQ ID NO: 2026
  misc_feature 372, 402, 461, 466, 496: n = A,T,C or G

SEQ ID NO: 3027 - DNA, 501 bp, Homo sapiens; identical to SEQ ID NO: 2027
  misc_feature 422, 458, 467, 480: n = A,T,C or G

SEQ ID NO: 3028 - DNA, 500 bp, Homo sapiens; identical to SEQ ID NO: 2028
  misc_feature 426, 444, 447, 470: n = A,T,C or G

SEQ ID NO: 3029 - DNA, 375 bp, Homo sapiens; identical to SEQ ID NO: 2029
  misc_feature 16, 40, 231, 268, 318, 355, 357: n = A,T,C or G

SEQ ID NO: 3030 - DNA, 599 bp, Homo sapiens; identical to SEQ ID NO: 2030
  misc_feature 7, 15, 72, 75, 128, 181, 215, 221, 302, 327, 350, 355, 443,459, 466, 472, 475, 503, 528, 581, 583: n = A,T,C or G

SEQ ID NO: 3031 - DNA, 381 bp, Homo sapiens; identical to SEQ ID NO: 2031
  misc_feature 20, 22, 27, 37, 40, 45, 58, 110, 150, 189, 224: n = A,T,C or G

SEQ ID NO: 3032 - DNA, 630 bp, Homo sapiens; identical to SEQ ID NO: 2032
  misc_feature 14, 39, 48, 57, 78, 117, 137, 159, 179, 205, 209, 270, 292,457, 512, 580, 587, 612: n = A,T,C or G

SEQ ID NO: 3033 - DNA, 258 bp, Homo sapiens; identical to SEQ ID NO: 2033

SEQ ID NO: 3034 - DNA, 758 bp, Homo sapiens; identical to SEQ ID NO: 2034
  misc_feature 50, 170, 203, 231, 273, 284, 292, 299, 323, 337, 350, 356,367, 371, 390, 446, 456, 469, 474, 524, 566, 568, 582, 601,604, 623, 634, 654, 672, 676, 677, 684, 687, 704, 713, 724,725, 726, 733: n = A,T,C or G

SEQ ID NO: 3035 - DNA, 240 bp, Homo sapiens; identical to SEQ ID NO: 2035
  misc_feature 140: n = A,T,C or G

SEQ ID NO: 3036 - DNA, 516 bp, Homo sapiens; identical to SEQ ID NO: 2036
  misc_feature 6, 20, 22, 30, 36, 40, 45, 46, 49, 51, 52, 53, 55, 70, 73,74, 123, 126, 135, 205, 207, 213, 215, 236, 247, 257, 268,276, 286, 290, 298, 299, 302, 365, 441, 443, 452, 457, 460,466, 470: n = A,T,C or G

SEQ ID NO: 3037 - DNA, 271 bp, Homo sapiens; identical to SEQ ID NO: 2037

SEQ ID NO: 3038 - DNA, 331 bp, Homo sapiens; identical to SEQ ID NO: 2038

SEQ ID NO: 3039 - DNA, 111 bp, Homo sapiens; identical to SEQ ID NO: 2039

SEQ ID NO: 3040 - DNA, 378 bp, Homo sapiens; identical to SEQ ID NO: 2040
  misc_feature 202, 212, 215, 225, 226, 231, 288: n = A,T,C or G

SEQ ID NO: 3041 - DNA, 110 bp, Homo sapiens; identical to SEQ ID NO: 2041

SEQ ID NO: 3042 - DNA, 70 bp, Homo sapiens; identical to SEQ ID NO: 2042

SEQ ID NO: 3043 - DNA, 181 bp, Homo sapiens; identical to SEQ ID NO: 2043

SEQ ID NO: 3044 - DNA, 342 bp, Homo sapiens; identical to SEQ ID NO: 2044
  misc_feature 291, 308, 313: n = A,T,C or G

SEQ ID NO: 3045 - DNA, 267 bp, Homo sapiens; identical to SEQ ID NO: 2045
  misc_feature 139, 162, 172, 179, 192, 251: n = A,T,C or G

SEQ ID NO: 3046 - DNA, 331 bp, Homo sapiens; identical to SEQ ID NO: 2046

SEQ ID NO: 3047 - DNA, 330 bp, Homo sapiens; identical to SEQ ID NO: 2047

SEQ ID NO: 3048 - DNA, 330 bp, Homo sapiens; identical to SEQ ID NO: 2048

SEQ ID NO: 3049 - DNA, 338 bp, Homo sapiens; identical to SEQ ID NO: 2049
  misc_feature 149, 283: n = A,T,C or G

SEQ ID NO: 3050 - DNA, 237 bp, Homo sapiens; identical to SEQ ID NO: 2050

SEQ ID NO: 3051 - DNA, 331 bp, Homo sapiens; identical to SEQ ID NO: 2051
  misc_feature 306, 312: n = A,T,C or G

SEQ ID NO: 3052 - DNA, 218 bp, Homo sapiens; identical to SEQ ID NO: 2052

SEQ ID NO: 3053 - DNA, 330 bp, Homo sapiens; identical to SEQ ID NO: 2053
  misc_feature 12, 299: n = A,T,C or G

SEQ ID NO: 3054 - DNA, 172 bp, Homo sapiens; identical to SEQ ID NO: 2054

SEQ ID NO: 3055 - DNA, 336 bp, Homo sapiens; identical to SEQ ID NO: 2055

SEQ ID NO: 3056 - DNA, 332 bp, Homo sapiens; identical to SEQ ID NO: 2056

SEQ ID NO: 3057 - DNA, 62 bp, Homo sapiens; identical to SEQ ID NO: 2057

SEQ ID NO: 3058 - DNA, 332 bp, Homo sapiens; identical to SEQ ID NO: 2058

SEQ ID NO: 3059 - DNA, 308 bp, Homo sapiens; identical to SEQ ID NO: 2059
  misc_feature 80, 121, 203, 208, 222, 230, 285, 289, 290: n = A,T,C or G

SEQ ID NO: 3060 - DNA, 354 bp, Homo sapiens; identical to SEQ ID NO: 2060
  misc_feature 126: n = A,T,C or G

SEQ ID NO: 3061 - DNA, 350 bp, Homo sapiens; identical to SEQ ID NO: 2061
  misc_feature 245, 274, 294, 328, 336: n = A,T,C or G

SEQ ID NO: 3062 - DNA, 193 bp, Homo sapiens; identical to SEQ ID NO: 2062
  misc_feature 64, 66, 84, 97, 100, 105, 110, 113, 116, 131, 137, 145, 161,167, 171, 177, 178: n = A,T,C or G

SEQ ID NO: 3063 - DNA, 310 bp, Homo sapiens; identical to SEQ ID NO: 2063

SEQ ID NO: 3064 - DNA, 317 bp, Homo sapiens; identical to SEQ ID NO: 2064
  misc_feature 167, 169, 170, 173, 286: n = A,T,C or G

SEQ ID NO: 3065 - DNA, 338 bp, Homo sapiens; identical to SEQ ID NO: 2065
  misc_feature 14, 292: n = A,T,C or G

SEQ ID NO: 3066 - DNA, 464 bp, Homo sapiens; identical to SEQ ID NO: 2066
  misc_feature 21, 43, 57, 122, 127, 138, 166, 193, 197, 198, 211, 214,223, 228, 236, 253, 255, 281, 301, 324, 333, 342, 347, 364,369, 376, 378, 387, 396, 399, 418, 440: n = A,T,C or G

SEQ ID NO: 3067 - DNA, 358 bp, Homo sapiens; identical to SEQ ID NO: 2067
  misc_feature 303: n = A,T,C or G

SEQ ID NO: 3068 - DNA, 348 bp, Homo sapiens; identical to SEQ ID NO: 2068
  misc_feature 5, 12, 36, 55, 93, 99, 147, 195, 197, 227, 248, 312, 323,330, 335: n = A,T,C or G

SEQ ID NO: 3069 - DNA, 360 bp, Homo sapiens; identical to SEQ ID NO: 2069
  misc_feature 270, 299, 322: n = A,T,C or G

SEQ ID NO: 3070 - DNA, 314 bp, Homo sapiens; identical to SEQ ID NO: 2070

SEQ ID NO: 3071 - DNA, 363 bp, Homo sapiens; identical to SEQ ID NO: 2071

SEQ ID NO: 3072 - DNA, 278 bp, Homo sapiens; identical to SEQ ID NO: 2072
  misc_feature 208: n = A,T,C or G

SEQ ID NO: 3073 - DNA, 85 bp, Homo sapiens; identical to SEQ ID NO: 2073

SEQ ID NO: 3074 - DNA, 320 bp, Homo sapiens; identical to SEQ ID NO: 2074
  misc_feature 290, 292, 295, 298, 301: n = A,T,C or G

SEQ ID NO: 3075 - DNA, 652 bp, Homo sapiens; identical to SEQ ID NO: 2075
  misc_feature 48, 52, 59, 61, 78, 81, 103, 154, 186, 212, 235, 247, 312,380, 489, 493, 501, 512, 516, 521, 542, 550, 570, 578, 614,629: n = A,T,C or G

SEQ ID NO: 3076 - DNA, 314 bp, Homo sapiens; identical to SEQ ID NO: 2076
  misc_feature 294, 300: n = A,T,C or G

SEQ ID NO: 3077 - DNA, 328 bp, Homo sapiens; identical to SEQ ID NO: 2077
  misc_feature 14, 294, 300, 311: n = A,T,C or G

SEQ ID NO: 3078 - DNA, 324 bp, Homo sapiens; identical to SEQ ID NO: 2078
  misc_feature 283: n = A,T,C or G

SEQ ID NO: 3079 - DNA, 238 bp, Homo sapiens; identical to SEQ ID NO: 2079

SEQ ID NO: 3080 - DNA, 427 bp, Homo sapiens; identical to SEQ ID NO: 2080
  misc_feature 229, 231, 264, 335, 338, 340, 364: n = A,T,C or G

SEQ ID NO: 3081 - DNA, 459 bp, Homo sapiens; identical to SEQ ID NO: 2081
  misc_feature 407, 419, 431, 436, 438: n = A,T,C or G

SEQ ID NO: 3082 - DNA, 433 bp, Homo sapiens; identical to SEQ ID NO: 2082

SEQ ID NO: 3083 - DNA, 525 bp, Homo sapiens; identical to SEQ ID NO: 2083
  misc_feature 10, 442, 447, 452, 459, 475, 494, 498, 502: n = A,T,C or G

SEQ ID NO: 3084 - DNA, 524 bp, Homo sapiens; identical to SEQ ID NO: 2084
  misc_feature 431, 433, 434, 444, 455, 456, 473, 477, 479, 480, 487, 490,491, 495, 499: n = A,T,C or G

SEQ ID NO: 3085 - DNA, 551 bp, Homo sapiens; identical to SEQ ID NO: 2085
  misc_feature 374, 425, 436, 446, 449, 452, 462, 485, 498, 511, 512, 537,538: n = A,T,C or G

SEQ ID NO: 3086 - DNA, 500 bp, Homo sapiens; identical to SEQ ID NO: 2086
  misc_feature 20, 168, 285, 312, 314, 369, 371, 372, 382, 386, 388, 399: n = A,T,C or G

SEQ ID NO: 3087 - DNA, 526 bp, Homo sapiens; identical to SEQ ID NO: 2087
  misc_feature 415, 437, 443, 444, 454, 466, 474, 490, 498, 506: n = A,T,C or G

SEQ ID NO: 3088 - DNA, 521 bp, Homo sapiens; identical to SEQ ID NO: 2088
  misc_feature 427, 429, 449, 455, 459, 465, 501: n = A,T,C or G

SEQ ID NO: 3089 - DNA, 392 bp, Homo sapiens; identical to SEQ ID NO: 2089
  misc_feature 60, 185: n = A,T,C or G

SEQ ID NO: 3090 - DNA, 460 bp, Homo sapiens; identical to SEQ ID NO: 2090
  misc_feature 230, 356, 363, 367, 376, 398, 420, 442, 446, 447: n = A,T,C or G

SEQ ID NO: 3091 - DNA, 466 bp, Homo sapiens; identical to SEQ ID NO: 2091
  misc_feature 386, 396, 403, 423, 436, 441: n = A,T,C or G

SEQ ID NO: 3092 - DNA, 347 bp, Homo sapiens; identical to SEQ ID NO: 2092
  misc_feature 136: n = A,T,C or G

SEQ ID NO: 3093 - DNA, 366 bp, Homo sapiens; identical to SEQ ID NO: 2093
  misc_feature 81: n = A,T,C or G

SEQ ID NO: 3094 - DNA, 527 bp, Homo sapiens; identical to SEQ ID NO: 2094
  misc_feature 414, 421, 423, 429, 432, 439, 441, 450, 454, 455, 463, 483: n = A,T,C or G

SEQ ID NO: 3095 - DNA, 544 bp, Homo sapiens; identical to SEQ ID NO: 2095
  misc_feature 408, 433, 436, 437, 439, 442, 445, 453, 474, 479, 481, 519: n = A,T,C or G

SEQ ID NO: 3096 - DNA, 396 bp, Homo sapiens; identical to SEQ ID NO: 2096
  misc_feature 17, 93, 190, 194, 209, 232, 273, 300, 302, 316, 330, 335,347, 356, 376, 383: n = A,T,C or G

SEQ ID NO: 3097 - DNA, 373 bp, Homo sapiens; identical to SEQ ID NO: 2097

SEQ ID NO: 3098 - DNA, 352 bp, Homo sapiens; identical to SEQ ID NO: 2098

SEQ ID NO: 3099 - DNA, 352 bp, Homo sapiens; identical to SEQ ID NO: 2099
  misc_feature 238: n = A,T,C or G

SEQ ID NO: 3100 - DNA, 184 bp, Homo sapiens; identical to SEQ ID NO: 2100

SEQ ID NO: 3101 - DNA, 447 bp, Homo sapiens; identical to SEQ ID NO: 2101
  misc_feature 372, 394: n = A,T,C or G

SEQ ID NO: 3102 - DNA, 636 bp, Homo sapiens; identical to SEQ ID NO: 2102
  misc_feature 571, 606: n = A,T,C or G

SEQ ID NO: 3103 - DNA, 473 bp, Homo sapiens; identical to SEQ ID NO: 2103
  misc_feature 425: n = A,T,C or G

SEQ ID NO: 3104 - DNA, 176 bp, Homo sapiens; identical to SEQ ID NO: 2104

SEQ ID NO: 3105 - DNA, 578 bp, Homo sapiens; identical to SEQ ID NO: 2105
  misc_feature 286, 407, 448, 450: n = A,T,C or G

SEQ ID NO: 3106 - DNA, 494 bp, Homo sapiens; identical to SEQ ID NO: 2106

SEQ ID NO: 3107 - DNA, 447 bp, Homo sapiens; identical to SEQ ID NO: 2107
  misc_feature 406: n = A,T,C or G

SEQ ID NO: 3108 - DNA, 668 bp, Homo sapiens; identical to SEQ ID NO: 2108
  misc_feature 523, 607, 636, 638: n = A,T,C or G

SEQ ID NO: 3109 - DNA, 270 bp, Homo sapiens; identical to SEQ ID NO: 2109

SEQ ID NO: 3110 - DNA, 193 bp, Homo sapiens; identical to SEQ ID NO: 2110
  misc_feature 83, 84, 103, 114, 157: n = A,T,C or G

SEQ ID NO: 3111 - DNA, 599 bp, Homo sapiens; identical to SEQ ID NO: 2111
  misc_feature 26, 60, 68, 109, 122, 126, 129, 144, 159, 241: n = A,T,C or G

SEQ ID NO: 3112 - DNA, 660 bp, Homo sapiens; identical to SEQ ID NO: 2112
  misc_feature 31, 325, 583, 607, 610, 635, 637, 642: n = A,T,C or G

SEQ ID NO: 3113 - DNA, 394 bp, Homo sapiens; identical to SEQ ID NO: 2113

SEQ ID NO: 3114 - DNA, 312 bp, Homo sapiens; identical to SEQ ID NO: 2114
  misc_feature 2, 6, 10, 12, 18, 23, 28, 29, 31, 76, 91, 93, 95, 115, 138,201, 219, 236, 245, 265, 273, 281, 297: n = A,T,C or G

SEQ ID NO: 3115 - DNA, 405 bp, Homo sapiens; identical to SEQ ID NO: 2115

SEQ ID NO: 3116 - DNA, 324 bp, Homo sapiens; identical to SEQ ID NO: 2116

SEQ ID NO: 3117 - DNA, 312 bp, Homo sapiens; identical to SEQ ID NO: 2117

SEQ ID NO: 3118 - DNA, 543 bp, Homo sapiens; identical to SEQ ID NO: 2118
  misc_feature 467: n = A,T,C or G

SEQ ID NO: 3119 - DNA, 690 bp, Homo sapiens; identical to SEQ ID NO: 2119
  misc_feature 22, 26, 30, 48, 52, 61, 68, 72, 80, 98, 105, 108, 128, 144,180, 206, 218, 221, 233, 238, 268, 276, 278, 281, 292, 296,315, 316, 319, 336, 347, 359, 361, 364, 381, 458, 469, 484,491, 499, 512, 527, 538, 551, 563, 566, 569, 574, 575: n = A,T,C or G
  misc_feature 598, 613, 633, 648: n = A,T,C or G

SEQ ID NO: 3120 - DNA, 404 bp, Homo sapiens; identical to SEQ ID NO: 2120

SEQ ID NO: 3121 - DNA, 369 bp, Homo sapiens; identical to SEQ ID NO: 2121

SEQ ID NO: 3122 - DNA, 371 bp, Homo sapiens; identical to SEQ ID NO: 2122

SEQ ID NO: 3123 - DNA, 561 bp, Homo sapiens; identical to SEQ ID NO: 2123
  misc_feature 486, 526: n = A,T,C or G

SEQ ID NO: 3124 - DNA, 389 bp, Homo sapiens; identical to SEQ ID NO: 2124
  misc_feature 42: n = A,T,C or G

SEQ ID NO: 3125 - DNA, 204 bp, Homo sapiens; identical to SEQ ID NO: 2125

SEQ ID NO: 3126 - DNA, 173 bp, Homo sapiens; identical to SEQ ID NO: 2126

SEQ ID NO: 3127 - DNA, 359 bp, Homo sapiens; identical to SEQ ID NO: 2127

SEQ ID NO: 3128 - DNA, 312 bp, Homo sapiens; identical to SEQ ID NO: 2128

SEQ ID NO: 3129 - DNA, 378 bp, Homo sapiens; identical to SEQ ID NO: 2129

SEQ ID NO: 3130 - DNA, 379 bp, Homo sapiens; identical to SEQ ID NO: 2130

SEQ ID NO: 3131 - DNA, 376 bp, Homo sapiens; identical to SEQ ID NO: 2131

SEQ ID NO: 3132 - DNA, 193 bp, Homo sapiens; identical to SEQ ID NO: 2132
  misc_feature 3, 4, 7, 8, 13, 16, 18, 34, 56, 76: n = A,T,C or G

SEQ ID NO: 3133 - DNA, 471 bp, Homo sapiens; identical to SEQ ID NO: 2133
  misc_feature 8, 9, 11, 20, 47, 48, 51, 54, 58, 60, 73, 74, 82, 88, 93,96, 97, 103, 107, 108: n = A,T,C or G

SEQ ID NO: 3134 - DNA, 326 bp, Homo sapiens; identical to SEQ ID NO: 2134
  misc_feature 2, 5, 8, 9, 13, 33, 39, 41, 47: n = A,T,C or G

SEQ ID NO: 3135 - DNA, 289 bp, Homo sapiens; identical to SEQ ID NO: 2135

SEQ ID NO: 3136 - DNA, 254 bp, Homo sapiens; identical to SEQ ID NO: 2136

SEQ ID NO: 3137 - DNA, 285 bp, Homo sapiens; identical to SEQ ID NO: 2137
  misc_feature 4, 7, 32, 115, 173, 174, 191, 193, 202, 207: n = A,T,C or G

SEQ ID NO: 3138 - DNA, 290 bp, Homo sapiens; identical to SEQ ID NO: 2138

SEQ ID NO: 3139 - DNA, 331 bp, Homo sapiens; identical to SEQ ID NO: 2139

SEQ ID NO: 3140 - DNA, 401 bp, Homo sapiens; identical to SEQ ID NO: 2140

SEQ ID NO: 3141 - DNA, 132 bp, Homo sapiens; identical to SEQ ID NO: 2141

SEQ ID NO: 3142 - DNA, 125 bp, Homo sapiens; identical to SEQ ID NO: 2142

SEQ ID NO: 3143 - DNA, 290 bp, Homo sapiens; identical to SEQ ID NO: 2143
  misc_feature 250, 263, 267, 272: n = A,T,C or G

SEQ ID NO: 3144 - DNA, 166 bp, Homo sapiens; identical to SEQ ID NO: 2144
  misc_feature 92: n = A,T,C or G

SEQ ID NO: 3145 - DNA, 616 bp, Homo sapiens; identical to SEQ ID NO: 2145
  misc_feature 39, 43, 51, 425, 457, 523, 528, 550, 557: n = A,T,C or G

SEQ ID NO: 3146 - DNA, 101 bp, Homo sapiens; identical to SEQ ID NO: 2146
  misc_feature 2, 39: n = A,T,C or G

SEQ ID NO: 3147 - DNA, 154 bp, Homo sapiens; identical to SEQ ID NO: 2147

SEQ ID NO: 3148 - DNA, 241 bp, Homo sapiens; identical to SEQ ID NO: 2148

SEQ ID NO: 3149 - DNA, 353 bp, Homo sapiens; identical to SEQ ID NO: 2149
  misc_feature 7, 10, 14, 25, 57, 85, 89, 95, 97, 99, 132: n = A,T,C or G

SEQ ID NO: 3150 - DNA, 609 bp, Homo sapiens; identical to SEQ ID NO: 2150
  misc_feature 3, 5, 11, 12, 15, 23, 489, 517, 533, 541, 563, 588: n = A,T,C or G

SEQ ID NO: 3151 - DNA, 411 bp, Homo sapiens; identical to SEQ ID NO: 2151
  misc_feature 246, 317, 326, 327, 328, 329, 330, 331, 332, 333, 334, 335,336, 337, 338, 339, 340, 341, 342, 343, 344, 345, 350, 353,368, 383, 388, 390: n = A,T,C or G

SEQ ID NO: 3152 - DNA, 296 bp, Homo sapiens; identical to SEQ ID NO: 2152

SEQ ID NO: 3153 - DNA, 523 bp, Homo sapiens; identical to SEQ ID NO: 2153
  misc_feature 471, 500: n = A,T,C or G

SEQ ID NO: 3154 - DNA, 471 bp, Homo sapiens; identical to SEQ ID NO: 2154
  misc_feature 406, 418, 437, 447, 453: n = A,T,C or G

SEQ ID NO: 3155 - DNA, 303 bp, Homo sapiens; identical to SEQ ID NO: 2155
  misc_feature 165, 168, 177, 180, 187, 188, 189, 193, 206, 207, 216, 233,236, 237, 244, 245, 249, 258, 259, 264, 266, 278, 279, 280,282: n = A,T,C or G

SEQ ID NO: 3156 - DNA, 526 bp, Homo sapiens; identical to SEQ ID NO: 2156
  misc_feature 459, 462, 468, 471, 475, 478, 483, 488, 492, 503: n = A,T,C or G

SEQ ID NO: 3157 - DNA, 499 bp, Homo sapiens; identical to SEQ ID NO: 2157
  misc_feature 12, 324, 329, 331, 334, 341, 344, 345, 347, 363, 364, 374,378, 379, 380, 381, 384, 386, 389, 396, 397, 402, 405, 408,416, 422, 430, 447, 451, 452: n = A,T,C or G

SEQ ID NO: 3158 - DNA, 497 bp, Homo sapiens; identical to SEQ ID NO: 2158
  misc_feature 445, 447: n = A,T,C or G

SEQ ID NO: 3159 - DNA, 580 bp, Homo sapiens; identical to SEQ ID NO: 2159
  misc_feature 3, 11, 18, 19, 25, 26, 28, 36, 42, 44, 46, 63, 73, 74, 82,103, 125, 334, 403, 405, 510, 521, 526, 553, 560: n = A,T,C or G

SEQ ID NO: 3160 - DNA, 367 bp, Homo sapiens; identical to SEQ ID NO: 2160

SEQ ID NO: 3161 - DNA, 461 bp, Homo sapiens; identical to SEQ ID NO: 2161
  misc_feature 414: n = A,T,C or G

SEQ ID NO: 3162 - DNA, 530 bp, Homo sapiens; identical to SEQ ID NO: 2162
  misc_feature 474, 483, 492, 499, 516: n = A,T,C or G

SEQ ID NO: 3163 - DNA, 136 bp, Homo sapiens; identical to SEQ ID NO: 2163

SEQ ID NO: 3164 - DNA, 518 bp, Homo sapiens; identical to SEQ ID NO: 2164
  misc_feature 35, 51, 53, 58, 71, 79, 105, 129, 148, 158, 205, 211, 217,235, 240, 284, 317, 323, 341, 355, 372, 374, 377, 403, 404,405, 422, 425, 426, 455, 462, 467, 471, 493, 495, 503, 504: n = A,T,C or G

SEQ ID NO: 3165 - DNA, 296 bp, Homo sapiens; identical to SEQ ID NO: 2165

SEQ ID NO: 3166 - DNA, 338 bp, Homo sapiens; identical to SEQ ID NO: 2166

SEQ ID NO: 3167 - DNA, 452 bp, Homo sapiens; identical to SEQ ID NO: 2167
  misc_feature 349, 378: n = A,T,C or G

SEQ ID NO: 3168 - DNA, 513 bp, Homo sapiens; identical to SEQ ID NO: 2168
  misc_feature 361, 379, 383, 389, 390, 412, 416, 425, 426, 441, 457, 469,472, 483, 484: n = A,T,C or G

SEQ ID NO: 3169 - DNA, 150 bp, Homo sapiens; identical to SEQ ID NO: 2169

SEQ ID NO: 3170 - DNA, 423 bp, Homo sapiens; identical to SEQ ID NO: 2170
  misc_feature 408: n = A,T,C or G

SEQ ID NO: 3171 - DNA, 497 bp, Homo sapiens; identical to SEQ ID NO: 2171
  misc_feature 407, 415, 435, 436, 446, 472, 478: n = A,T,C or G

SEQ ID NO: 3172 - DNA, 517 bp, Homo sapiens; identical to SEQ ID NO: 2172
  misc_feature 390, 402, 414, 427, 431, 457, 483, 487: n = A,T,C or G

SEQ ID NO: 3173 - DNA, 407 bp, Homo sapiens; identical to SEQ ID NO: 2173
  misc_feature 347, 366, 369, 370, 372, 382, 383, 387, 391, 393: n = A,T,C or G

SEQ ID NO: 3174 - DNA, 343 bp, Homo sapiens; identical to SEQ ID NO: 2174

SEQ ID NO: 3175 - DNA, 511 bp, Homo sapiens; identical to SEQ ID NO: 2175
  misc_feature 374, 379, 394, 443, 480, 490: n = A,T,C or G

SEQ ID NO: 3176 - DNA, 155 bp, Homo sapiens; identical to SEQ ID NO: 2176

SEQ ID NO: 3177 - DNA, 512 bp, Homo sapiens; identical to SEQ ID NO: 2177
  misc_feature 397, 420, 432, 471, 483: n = A,T,C or G

SEQ ID NO: 3178 - DNA, 536 bp, Homo sapiens; identical to SEQ ID NO: 2178
  misc_feature 394, 412, 430, 434, 435, 452, 460, 473, 503: n = A,T,C or G

SEQ ID NO: 3179 - DNA, 372 bp, Homo sapiens; identical to SEQ ID NO: 2179

SEQ ID NO: 3180 - DNA, 470 bp, Homo sapiens; identical to SEQ ID NO: 2180
  misc_feature 385, 421, 425: n = A,T,C or G

SEQ ID NO: 3181 - DNA, 540 bp, Homo sapiens; identical to SEQ ID NO: 2181
  misc_feature 17, 21, 37, 43, 116, 120, 124, 127, 130, 134, 136, 152, 154,174, 176, 183, 210, 228, 239, 276, 404, 410, 411, 413, 414,416, 435, 452, 461, 468, 481, 487, 492, 494, 496, 497, 501,502, 505, 506, 517, 520: n = A,T,C or G

SEQ ID NO: 3182 - DNA, 416 bp, Homo sapiens; identical to SEQ ID NO: 2182
  misc_feature 392, 398: n = A,T,C or G

SEQ ID NO: 3183 - DNA, 469 bp, Homo sapiens; identical to SEQ ID NO: 2183
  misc_feature 30, 31, 33, 38, 42, 51, 55, 58, 59, 61, 68, 70, 78, 333,391, 414, 417, 426, 432, 435, 444, 447: n = A,T,C or G

SEQ ID NO: 3184 - DNA, 608 bp, Homo sapiens; identical to SEQ ID NO: 2184
  misc_feature 14, 15, 25, 30, 31, 33, 50, 58, 60, 155, 159, 184, 191, 211,224, 226, 309, 406, 412, 415, 448, 450, 467, 483, 527, 538,541, 562, 567, 573, 574, 579, 591, 594: n = A,T,C or G

SEQ ID NO: 3185 - DNA, 174 bp, Homo sapiens; identical to SEQ ID NO: 2185

SEQ ID NO: 3186 - DNA, 399 bp, Homo sapiens; identical to SEQ ID NO: 2186
  misc_feature 355, 357, 360, 362: n = A,T,C or G

SEQ ID NO: 3187 - DNA, 457 bp, Homo sapiens; identical to SEQ ID NO: 2187
  misc_feature 367, 424, 444: n = A,T,C or G

SEQ ID NO: 3188 - DNA, 431 bp, Homo sapiens; identical to SEQ ID NO: 2188
  misc_feature 11, 23, 42, 48, 58, 66, 97, 131, 235, 251, 275, 289, 306,309, 315, 332, 336, 354, 358, 380, 383, 391, 393, 414: n = A,T,C or G

SEQ ID NO: 3189 - DNA, 618 bp, Homo sapiens; identical to SEQ ID NO: 2189
  misc_feature 13, 42, 47, 51, 62, 63, 67, 84, 87, 93, 110, 111, 114, 155,165, 226, 235, 255, 262, 286, 291, 344, 356, 371, 417, 445,494, 511, 528, 531, 544, 557, 560, 564, 580, 595: n = A,T,C or G

SEQ ID NO: 3190 - DNA, 435 bp, Homo sapiens; identical to SEQ ID NO: 2190
  misc_feature 388, 391, 401, 410: n = A,T,C or G

SEQ ID NO: 3191 - DNA, 282 bp, Homo sapiens; identical to SEQ ID NO: 2191
  misc_feature 107, 110, 126, 143, 178, 190, 218, 223, 237, 245, 265: n = A,T,C or G

SEQ ID NO: 3192 - DNA, 451 bp, Homo sapiens; identical to SEQ ID NO: 2192
  misc_feature 428: n = A,T,C or G

SEQ ID NO: 3193 - DNA, 278 bp, Homo sapiens; identical to SEQ ID NO: 2193
  misc_feature 32, 38, 40, 51, 57, 58, 63, 68, 76, 103, 180, 210, 234, 238,241: n = A,T,C or G

SEQ ID NO: 3194 - DNA, 293 bp, Homo sapiens; identical to SEQ ID NO: 2194

SEQ ID NO: 3195 - DNA, 475 bp, Homo sapiens; identical to SEQ ID NO: 2195

SEQ ID NO: 3196 - DNA, 458 bp, Homo sapiens; identical to SEQ ID NO: 2196
  misc_feature 422, 438: n = A,T,C or G

SEQ ID NO: 3197 - DNA, 523 bp, Homo sapiens; identical to SEQ ID NO: 2197
  misc_feature 205, 407, 410, 421, 457, 465, 473, 485: n = A,T,C or G

SEQ ID NO: 3198 - DNA, 475 bp, Homo sapiens; identical to SEQ ID NO: 2198
  misc_feature 462: n = A,T,C or G

SEQ ID NO: 3199 - DNA, 527 bp, Homo sapiens; identical to SEQ ID NO: 2199
  misc_feature 467, 510, 512: n = A,T,C or G

SEQ ID NO: 3200 - DNA, 505 bp, Homo sapiens; identical to SEQ ID NO: 2200
  misc_feature 448: n = A,T,C or G

SEQ ID NO: 3201 - DNA, 377 bp, Homo sapiens; identical to SEQ ID NO: 2201
  misc_feature 205: n = A,T,C or G

SEQ ID NO: 3202 - DNA, 533 bp, Homo sapiens; identical to SEQ ID NO: 2202
  misc_feature 16, 28, 29, 34, 36, 40, 42, 44, 51, 56, 58, 61, 66, 68, 76,87, 120, 213, 258, 273, 282, 286, 311, 320, 327, 336, 358,362, 365, 366, 372, 406, 422, 458, 470, 479, 483, 485: n = A,T,C or G

SEQ ID NO: 3203 - DNA, 520 bp, Homo sapiens; identical to SEQ ID NO: 2203
  misc_feature 465, 503, 505: n = A,T,C or G

SEQ ID NO: 3204 - DNA, 508 bp, Homo sapiens; identical to SEQ ID NO: 2204

SEQ ID NO: 3205 - DNA, 229 bp, Homo sapiens; identical to SEQ ID NO: 2205

SEQ ID NO: 3206 - DNA, 298 bp, Homo sapiens; identical to SEQ ID NO: 2206
  misc_feature 212: n = A,T,C or G

SEQ ID NO: 3207 - DNA, 299 bp, Homo sapiens; identical to SEQ ID NO: 2207

SEQ ID NO: 3208 - DNA, 435 bp, Homo sapiens; identical to SEQ ID NO: 2208
  misc_feature 25: n = A,T,C or G

SEQ ID NO: 3209 - DNA, 334 bp, Homo sapiens; identical to SEQ ID NO: 2209
  misc_feature 11, 22: n = A,T,C or G

SEQ ID NO: 3210 - DNA, 567 bp, Homo sapiens; identical to SEQ ID NO: 2210
  misc_feature 20, 44, 53, 72, 83, 115, 116, 134, 138, 143, 160, 173, 176,214, 255, 291, 311, 314, 320, 327, 332, 339, 387, 388, 402,411, 415, 418, 427, 439, 444, 472, 474, 481, 485, 487, 496,497, 500, 515, 516, 520, 546: n = A,T,C or G

SEQ ID NO: 3211 - DNA, 652 bp, Homo sapiens; identical to SEQ ID NO: 2211
  misc_feature 583, 610, 618: n = A,T,C or G

SEQ ID NO: 3212 - DNA, 485 bp, Homo sapiens; identical to SEQ ID NO: 2212

SEQ ID NO: 3213 - DNA, 667 bp, Homo sapiens; identical to SEQ ID NO: 2213
  misc_feature 515, 588: n = A,T,C or G

SEQ ID NO: 3214 - DNA, 679 bp, Homo sapiens; identical to SEQ ID NO: 2214
  misc_feature 508, 516, 593, 664: n = A,T,C or G

SEQ ID NO: 3215 - DNA, 592 bp, Homo sapiens; identical to SEQ ID NO: 2215
  misc_feature 431, 535, 544, 550, 571: n = A,T,C or G

SEQ ID NO: 3216 - DNA, 316 bp, Homo sapiens; identical to SEQ ID NO: 2216
  misc_feature 14, 22, 27, 30, 31, 34, 42, 59, 62, 106, 123, 125, 127, 140,142, 183, 193, 230, 256, 275, 276, 283, 296: n = A,T,C or G

SEQ ID NO: 3217 - DNA, 184 bp, Homo sapiens; identical to SEQ ID NO: 2217
  misc_feature 7, 10, 12, 22, 23, 27, 28, 29, 121: n = A,T,C or G

SEQ ID NO: 3218 - DNA, 592 bp, Homo sapiens; identical to SEQ ID NO: 2218
  misc_feature 30, 36, 37, 48, 51, 61, 72, 74, 75, 392, 518: n = A,T,C or G

SEQ ID NO: 3219 - DNA, 167 bp, Homo sapiens; identical to SEQ ID NO: 2219
  misc_feature 25, 30, 31: n = A,T,C or G

SEQ ID NO: 3220 - DNA, 477 bp, Homo sapiens; identical to SEQ ID NO: 2220
  misc_feature 374, 380, 407, 425, 432, 448, 452: n = A,T,C or G

SEQ ID NO: 3221 - DNA, 188 bp, Homo sapiens; identical to SEQ ID NO: 2221

SEQ ID NO: 3222 - DNA, 682 bp, Homo sapiens; identical to SEQ ID NO: 2222
  misc_feature 529, 589, 607, 659, 669: n = A,T,C or G

SEQ ID NO: 3223 - DNA, 663 bp, Homo sapiens; identical to SEQ ID NO: 2223
  misc_feature 569, 576, 611, 640: n = A,T,C or G

SEQ ID NO: 3224 - DNA, 580 bp, Homo sapiens; identical to SEQ ID NO: 2224
  misc_feature 2, 6, 10, 14, 18, 22, 25, 26, 27, 30, 39, 42, 47, 49, 548,556: n = A,T,C or G

SEQ ID NO: 3225 - DNA, 278 bp, Homo sapiens; identical to SEQ ID NO: 2225
  misc_feature 89: n = A,T,C or G

SEQ ID NO: 3226 - DNA, 700 bp, Homo sapiens; identical to SEQ ID NO: 2226
  misc_feature 17, 18, 22, 32, 33, 35, 45, 55, 82, 91, 118, 120, 121, 123,131, 135, 144, 148, 150, 168, 178, 185, 191, 194, 207, 220,239, 241, 257, 261, 269, 286, 304, 311, 318, 332, 333, 368,388, 390, 411, 425, 444, 451, 455, 456, 458, 477, 490: n = A,T,C or G
  misc_feature 504, 516, 532, 587, 619, 658, 665: n = A,T,C or G

SEQ ID NO: 3227 - DNA, 353 bp, Homo sapiens; identical to SEQ ID NO: 2227

SEQ ID NO: 3228 - DNA, 266 bp, Homo sapiens; identical to SEQ ID NO: 2228
  misc_feature 10: n = A,T,C or G

SEQ ID NO: 3229 - DNA, 679 bp, Homo sapiens; identical to SEQ ID NO: 2229
  misc_feature 442, 505, 562, 622, 624, 629, 654: n = A,T,C or G

SEQ ID NO: 3230 - DNA, 375 bp, Homo sapiens; identical to SEQ ID NO: 2230

SEQ ID NO: 3231 - DNA, 232 bp, Homo sapiens; identical to SEQ ID NO: 2231
  misc_feature 17: n = A,T,C or G

SEQ ID NO: 3232 - DNA, 571 bp, Homo sapiens; identical to SEQ ID NO: 2232
  misc_feature 330, 460, 475, 501, 552, 554: n = A,T,C or G

SEQ ID NO: 3233 - DNA, 468 bp, Homo sapiens; identical to SEQ ID NO: 2233
  misc_feature 15, 152, 293, 314: n = A,T,C or G

SEQ ID NO: 3234 - DNA, 146 bp, Homo sapiens; identical to SEQ ID NO: 2234

SEQ ID NO: 3235 - DNA, 693 bp, Homo sapiens; identical to SEQ ID NO: 2235
  misc_feature 338, 372, 380, 384, 405, 424, 428, 449, 473, 475, 481, 491,507, 533, 536, 542, 546, 550, 557, 560, 566, 569, 570, 573,577, 578, 584, 588, 599, 602, 606, 608, 611, 612, 618, 620,626, 632, 634, 644, 645, 646, 655, 656, 661, 662, 663: n = A,T,C or G
  misc_feature 673, 675, 676: n = A,T,C or G

SEQ ID NO: 3236 - DNA, 181 bp, Homo sapiens; identical to SEQ ID NO: 2236
  misc_feature 29, 40, 44, 45, 51, 56, 64, 68, 78, 80: n = A,T,C or G

SEQ ID NO: 3237 - DNA, 689 bp, Homo sapiens; identical to SEQ ID NO: 2237
  misc_feature 30, 551, 588, 591, 615, 638, 648, 654, 660, 661, 663, 670: n = A,T,C or G

SEQ ID NO: 3238 - DNA, 401 bp, Homo sapiens; identical to SEQ ID NO: 2238
  misc_feature 30, 41, 43, 46, 49: n = A,T,C or G

SEQ ID NO: 3239 - DNA, 446 bp, Homo sapiens; identical to SEQ ID NO: 2239
  misc_feature 386, 396, 397, 398, 399, 400, 401, 402, 403, 405, 406, 407,408, 409, 410, 411, 412, 413, 414, 415, 416, 417, 418, 419,420, 421, 422: n = A,T,C or G

SEQ ID NO: 3240 - DNA, 500 bp, Homo sapiens; identical to SEQ ID NO: 2240
  misc_feature 188, 341, 379, 382, 400, 410, 411, 412, 418, 422, 425, 428,429, 438, 449, 469, 472, 485: n = A,T,C or G

SEQ ID NO: 3241 - DNA, 495 bp, Homo sapiens; identical to SEQ ID NO: 2241
  misc_feature 368, 372, 384, 398, 412, 413, 427, 445, 448: n = A,T,C or G

SEQ ID NO: 3242 - DNA, 469 bp, Homo sapiens; identical to SEQ ID NO: 2242
  misc_feature 386, 412, 413, 414, 417, 421, 431: n = A,T,C or G

SEQ ID NO: 3243 - DNA, 469 bp, Homo sapiens; identical to SEQ ID NO: 2243
  misc_feature 374, 408, 421, 422, 441, 443: n = A,T,C or G

SEQ ID NO: 3244 - DNA, 79 bp, Homo sapiens; identical to SEQ ID NO: 2244
  misc_feature 14, 24, 54, 66: n = A,T,C or G

SEQ ID NO: 3245 - DNA, 251 bp, Homo sapiens; identical to SEQ ID NO: 2245
  misc_feature 19, 30, 35, 43, 48, 84, 109, 139, 165, 194: n = A,T,C or G

SEQ ID NO: 3246 - DNA, 487 bp, Homo sapiens; identical to SEQ ID NO: 2246
  misc_feature 41, 44, 45, 47, 52, 80, 112, 132, 146, 147, 150, 152, 154,159, 166, 177, 205, 291, 322, 347, 357, 359, 371, 394, 397,406, 407, 413, 422, 461, 469, 470: n = A,T,C or G

SEQ ID NO: 3247 - DNA, 148 bp, Homo sapiens; identical to SEQ ID NO: 2247

SEQ ID NO: 3248 - DNA, 455 bp, Homo sapiens; identical to SEQ ID NO: 2248
  misc_feature 404, 414, 417, 424, 429, 437, 440: n = A,T,C or G

SEQ ID NO: 3249 - DNA, 433 bp, Homo sapiens; identical to SEQ ID NO: 2249
  misc_feature 391, 396, 406, 416: n = A,T,C or G

SEQ ID NO: 3250 - DNA, 74 bp, Homo sapiens; identical to SEQ ID NO: 2250
  misc_feature 20: n = A,T,C or G

SEQ ID NO: 3251 - DNA, 390 bp, Homo sapiens; identical to SEQ ID NO: 2251

SEQ ID NO: 3252 - DNA, 149 bp, Homo sapiens; identical to SEQ ID NO: 2252

SEQ ID NO: 3253 - DNA, 447 bp, Homo sapiens; identical to SEQ ID NO: 2253
  misc_feature 370, 379, 388, 402, 411, 423, 426, 433: n = A,T,C or G

SEQ ID NO: 3254 - DNA, 472 bp, Homo sapiens; identical to SEQ ID NO: 2254
  misc_feature 409, 413, 419, 426, 429, 430, 435, 437, 438, 448: n = A,T,C or G

SEQ ID NO: 3255 - DNA, 423 bp, Homo sapiens; identical to SEQ ID NO: 2255
  misc_feature 385, 397, 403, 407: n = A,T,C or G

SEQ ID NO: 3256 - DNA, 465 bp, Homo sapiens; identical to SEQ ID NO: 2256
  misc_feature 61, 65, 67, 75, 89, 97, 106, 108, 120, 127, 133, 137, 146,151, 162, 181, 185, 205, 218, 226, 230, 240, 242, 249, 265,296, 312, 326, 343, 381, 391, 426, 442: n = A,T,C or G

SEQ ID NO: 3257 - DNA, 427 bp, Homo sapiens; identical to SEQ ID NO: 2257
  misc_feature 384, 402, 407, 410: n = A,T,C or G

SEQ ID NO: 3258 - DNA, 435 bp, Homo sapiens; identical to SEQ ID NO: 2258
  misc_feature 401, 419: n = A,T,C or G

SEQ ID NO: 3259 - DNA, 202 bp, Homo sapiens; identical to SEQ ID NO: 2259
  misc_feature 1, 5, 6, 8, 9, 10, 12, 19: n = A,T,C or G

SEQ ID NO: 3260 - DNA, 292 bp, Homo sapiens; identical to SEQ ID NO: 2260

SEQ ID NO: 3261 - DNA, 121 bp, Homo sapiens; identical to SEQ ID NO: 2261

SEQ ID NO: 3262 - DNA, 528 bp, Homo sapiens; identical to SEQ ID NO: 2262
  misc_feature 9, 26, 27, 57, 73, 80, 138, 141, 164, 165, 184, 455, 457,477, 508, 511: n = A,T,C or G

SEQ ID NO: 3263 - DNA, 309 bp, Homo sapiens; identical to SEQ ID NO: 2263

SEQ ID NO: 3264 - DNA, 384 bp, Homo sapiens; identical to SEQ ID NO: 2264

SEQ ID NO: 3265 - DNA, 368 bp, Homo sapiens; identical to SEQ ID NO: 2265
  misc_feature 333: n = A,T,C or G

SEQ ID NO: 3266 - DNA, 439 bp, Homo sapiens; identical to SEQ ID NO: 2266

SEQ ID NO: 3267 - DNA, 211 bp, Homo sapiens; identical to SEQ ID NO: 2267

SEQ ID NO: 3268 - DNA, 477 bp, Homo sapiens; identical to SEQ ID NO: 2268
  misc_feature 406: n = A,T,C or G

SEQ ID NO: 3269 - DNA, 567 bp, Homo sapiens; identical to SEQ ID NO: 2269
  misc_feature 21, 22, 23, 28, 30, 42, 47, 55, 65, 78, 100, 123, 129, 136,231, 290, 331, 359, 361, 363, 394, 401, 402, 407, 437, 443,459, 478, 483, 485, 491, 503, 509, 515: n = A,T,C or G

SEQ ID NO: 3270 - DNA, 294 bp, Homo sapiens; identical to SEQ ID NO: 2270
  misc_feature 19, 22, 30, 42, 51, 69, 86, 88, 102, 164, 181, 247, 250,252, 254, 277, 279: n = A,T,C or G

SEQ ID NO: 3271 - DNA, 217 bp, Homo sapiens; identical to SEQ ID NO: 2271

SEQ ID NO: 3272 - DNA, 191 bp, Homo sapiens; identical to SEQ ID NO: 2272
  misc_feature 20, 30: n = A,T,C or G

SEQ ID NO: 3273 - DNA, 284 bp, Homo sapiens; identical to SEQ ID NO: 2273

SEQ ID NO: 3274 - DNA, 102 bp, Homo sapiens; identical to SEQ ID NO: 2274
  misc_feature 19, 22, 54, 59, 69, 70: n = A,T,C or G

SEQ ID NO: 3275 - DNA, 369 bp, Homo sapiens; identical to SEQ ID NO: 2275

SEQ ID NO: 3276 - DNA, 174 bp, Homo sapiens; identical to SEQ ID NO: 2276

SEQ ID NO: 3277 - DNA, 359 bp, Homo sapiens; identical to SEQ ID NO: 2277
  misc_feature 31, 35, 39, 43, 54, 56, 59, 60, 68, 76, 78, 88, 99, 100,127, 171, 239, 299, 315, 336: n = A,T,C or G

SEQ ID NO: 3278 - DNA, 194 bp, Homo sapiens; identical to SEQ ID NO: 2278
  misc_feature 48, 105, 117, 127, 163, 168, 169: n = A,T,C or G

SEQ ID NO: 3279 - DNA, 390 bp, Homo sapiens; identical to SEQ ID NO: 2279
  misc_feature 32, 68, 76, 87: n = A,T,C or G

SEQ ID NO: 3280 - DNA, 399 bp, Homo sapiens; identical to SEQ ID NO: 2280
  misc_feature 3, 6, 8, 10, 11, 24, 26, 27, 30, 41, 44, 49, 55, 56, 64, 90: n = A,T,C or G

SEQ ID NO: 3281 - DNA, 117 bp, Homo sapiens; identical to SEQ ID NO: 2281
  misc_feature 22, 24, 27, 28, 29, 30: n = A,T,C or G

SEQ ID NO: 3282 - DNA, 262 bp, Homo sapiens; identical to SEQ ID NO: 2282

SEQ ID NO: 3283 - DNA, 513 bp, Homo sapiens; identical to SEQ ID NO: 2283
  misc_feature 2, 3, 14, 17, 18, 20, 23, 25, 26, 27, 44, 48, 50, 59, 67,70, 71, 75, 77, 80, 84, 103, 105, 107, 119, 120, 121, 126,133, 137, 139, 142, 149, 150, 157, 161, 428, 460, 492: n = A,T,C or G

SEQ ID NO: 3284 - DNA, 284 bp, Homo sapiens; identical to SEQ ID NO: 2284

SEQ ID NO: 3285 - DNA, 400 bp, Homo sapiens; identical to SEQ ID NO: 2285
  misc_feature 21, 22, 24, 27, 36, 37, 43, 49, 60, 68, 73, 74, 85, 338,341, 343, 346, 348, 349, 351, 354, 357, 360, 361, 365, 367,370, 372, 375, 382: n = A,T,C or G

SEQ ID NO: 3286 - DNA, 432 bp, Homo sapiens; identical to SEQ ID NO: 2286
  misc_feature 29, 38: n = A,T,C or G

SEQ ID NO: 3287 - DNA, 520 bp, Homo sapiens; identical to SEQ ID NO: 2287
  misc_feature 357, 440, 449, 455, 506: n = A,T,C or G

SEQ ID NO: 3288 - DNA, 350 bp, Homo sapiens; identical to SEQ ID NO: 2288

SEQ ID NO: 3289 - DNA, 409 bp, Homo sapiens; identical to SEQ ID NO: 2289

SEQ ID NO: 3290 - DNA, 276 bp, Homo sapiens; identical to SEQ ID NO: 2290
  misc_feature 4, 27, 43, 45, 55, 72, 75, 83, 88, 90, 94, 129, 182, 184,238, 251: n = A,T,C or G

SEQ ID NO: 3291 - DNA, 510 bp, Homo sapiens; identical to SEQ ID NO: 2291
  misc_feature 19, 401, 428, 446, 467, 470: n = A,T,C or G

SEQ ID NO: 3292 - DNA, 255 bp, Homo sapiens; identical to SEQ ID NO: 2292
  misc_feature 124, 132, 137, 142, 149, 150, 154, 157, 159, 161, 163, 166,170, 172, 174: n = A,T,C or G

SEQ ID NO: 3293 - DNA, 450 bp, Homo sapiens; identical to SEQ ID NO: 2293
  misc_feature 355, 363, 377, 378, 380, 381, 382, 386, 387, 391, 394, 395,397, 419, 423, 426, 430: n = A,T,C or G

SEQ ID NO: 3294 - DNA, 206 bp, Homo sapiens; identical to SEQ ID NO: 2294

SEQ ID NO: 3295 - DNA, 571 bp, Homo sapiens; identical to SEQ ID NO: 2295
  misc_feature 39, 40, 58, 66, 69, 73, 101, 106, 130, 131, 142, 183, 195,212, 235, 254, 311, 362, 470, 480, 508, 527, 531: n = A,T,C or G

SEQ ID NO: 3296 - DNA, 204 bp, Homo sapiens; identical to SEQ ID NO: 2296

SEQ ID NO: 3297 - DNA, 528 bp, Homo sapiens; identical to SEQ ID NO: 2297
  misc_feature 512: n = A,T,C or G

SEQ ID NO: 3298 - DNA, 468 bp, Homo sapiens; identical to SEQ ID NO: 2298
  misc_feature 266, 306, 320, 373, 374, 375, 376, 377, 378, 379, 380, 381,382, 383, 384, 385, 386, 387, 388, 389, 390, 391, 392, 393,394, 395, 396, 397, 398, 399, 400, 401, 402, 403, 417, 426,431, 447: n = A,T,C or G

SEQ ID NO: 3299 - DNA, 212 bp, Homo sapiens; identical to SEQ ID NO: 2299
  misc_feature 25, 40, 41, 48, 61, 100, 108, 134, 144: n = A,T,C or G

SEQ ID NO: 3300 - DNA, 323 bp, Homo sapiens; identical to SEQ ID NO: 2300
  misc_feature 35, 64, 83, 90, 92, 108, 127, 136, 137, 165, 168, 177, 199,207, 223, 232, 242, 252, 254, 259, 261, 262, 264, 270: n = A,T,C or G

SEQ ID NO: 3301 - DNA, 477 bp, Homo sapiens; identical to SEQ ID NO: 2301
  misc_feature 406, 418: n = A,T,C or G

SEQ ID NO: 3302 - DNA, 324 bp, Homo sapiens; identical to SEQ ID NO: 2302

SEQ ID NO: 3303 - DNA, 288 bp, Homo sapiens; identical to SEQ ID NO: 2303

SEQ ID NO: 3304 - DNA, 277 bp, Homo sapiens; identical to SEQ ID NO: 2304
  misc_feature 261, 263, 264: n = A,T,C or G

SEQ ID NO: 3305 - DNA, 418 bp, Homo sapiens; identical to SEQ ID NO: 2305

SEQ ID NO: 3306 - DNA, 394 bp, Homo sapiens; identical to SEQ ID NO: 2306
  misc_feature 25, 26, 43: n = A,T,C or G

SEQ ID NO: 3307 - DNA, 473 bp, Homo sapiens; identical to SEQ ID NO: 2307
  misc_feature 363, 418, 423, 450, 457: n = A,T,C or G

SEQ ID NO: 3308 - DNA, 301 bp, Homo sapiens; identical to SEQ ID NO: 2308
  misc_feature 30, 39, 73, 79, 88, 89, 90, 120, 126, 132, 135, 154, 193,197, 207, 216: n = A,T,C or G

SEQ ID NO: 3309 - DNA, 370 bp, Homo sapiens; identical to SEQ ID NO: 2309

SEQ ID NO: 3310 - DNA, 212 bp, Homo sapiens; identical to SEQ ID NO: 2310

SEQ ID NO: 3311 - DNA, 196 bp, Homo sapiens; identical to SEQ ID NO: 2311
  misc_feature 98, 129, 157, 183: n = A,T,C or G

SEQ ID NO: 3312 - DNA, 188 bp, Homo sapiens; identical to SEQ ID NO: 2312
  misc_feature 106, 131: n = A,T,C or G

SEQ ID NO: 3313 - DNA, 394 bp, Homo sapiens; identical to SEQ ID NO: 2313
  misc_feature 51, 367: n = A,T,C or G

SEQ ID NO: 3314 - DNA, 392 bp, Homo sapiens; identical to SEQ ID NO: 2314
  misc_feature 15: n = A,T,C or G

SEQ ID NO: 3315 - DNA, 387 bp, Homo sapiens; identical to SEQ ID NO: 2315
  misc_feature 330, 332, 334, 336, 338, 360, 361, 363, 370, 374: n = A,T,C or G

SEQ ID NO: 3316 - DNA, 636 bp, Homo sapiens; identical to SEQ ID NO: 2316
  misc_feature 12, 23, 45, 47, 54, 60, 78, 96, 100, 107, 117, 119, 164,310, 350, 353, 357, 358, 434, 441, 446, 485, 486, 489, 506,517, 523, 551, 552, 553, 564, 580, 586, 623: n = A,T,C or G

SEQ ID NO: 3317 - DNA, 395 bp, Homo sapiens; identical to SEQ ID NO: 2317

SEQ ID NO: 3318 - DNA, 143 bp, Homo sapiens; identical to SEQ ID NO: 2318
  misc_feature 65: n = A,T,C or G

SEQ ID NO: 3319 - DNA, 442 bp, Homo sapiens; identical to SEQ ID NO: 2319

SEQ ID NO: 3320 - DNA, 625 bp, Homo sapiens; identical to SEQ ID NO: 2320
  misc_feature 8, 27, 33, 39, 46, 52, 73, 76, 77, 86, 98, 99, 104, 118,120, 133, 143, 157, 171, 174, 193, 206, 220, 231, 233, 240,244, 246, 252, 262, 290, 298, 307, 337, 382, 413, 450, 489,513, 533, 540, 577, 581, 592, 608, 612: n = A,T,C or G

SEQ ID NO: 3321 - DNA, 161 bp, Homo sapiens; identical to SEQ ID NO: 2321

SEQ ID NO: 3322 - DNA, 162 bp, Homo sapiens; identical to SEQ ID NO: 2322

SEQ ID NO: 3323 - DNA, 505 bp, Homo sapiens; identical to SEQ ID NO: 2323
  misc_feature 271, 333, 392, 428, 468, 487, 489: n = A,T,C or G

SEQ ID NO: 3324 - DNA, 350 bp, Homo sapiens; identical to SEQ ID NO: 2324
  misc_feature 290, 294, 336: n = A,T,C or G

SEQ ID NO: 3325 - DNA, 479 bp, Homo sapiens; identical to SEQ ID NO: 2325
  misc_feature 447: n = A,T,C or G

SEQ ID NO: 3326 - DNA, 505 bp, Homo sapiens; identical to SEQ ID NO: 2326
  misc_feature 313, 346, 348, 354, 387, 390, 420, 422, 429, 435, 438, 443,457, 459, 461, 480, 486, 487: n = A,T,C or G

SEQ ID NO: 3327 - DNA, 461 bp, Homo sapiens; identical to SEQ ID NO: 2327
  misc_feature 266, 313, 360, 387, 395, 427, 433, 435, 444, 448: n = A,T,C or G

SEQ ID NO: 3328 - DNA, 502 bp, Homo sapiens; identical to SEQ ID NO: 2328
  misc_feature 243, 258, 270, 277, 285, 299, 322, 371, 375, 395, 396, 412,418, 436, 437, 438, 439, 440, 441, 442, 443, 444, 445, 446,447, 465, 466, 471, 486: n = A,T,C or G

SEQ ID NO: 3329 - DNA, 427 bp, Homo sapiens; identical to SEQ ID NO: 2329
  misc_feature 334: n = A,T,C or G

SEQ ID NO: 3330 - DNA, 427 bp, Homo sapiens; identical to SEQ ID NO: 2330

SEQ ID NO: 3331 - DNA, 426 bp, Homo sapiens; identical to SEQ ID NO: 2331

SEQ ID NO: 3332 - DNA, 243 bp, Homo sapiens; identical to SEQ ID NO: 2332

SEQ ID NO: 3333 - DNA, 427 bp, Homo sapiens; identical to SEQ ID NO: 2333
  misc_feature 333: n = A,T,C or G

SEQ ID NO: 3334 - DNA, 426 bp, Homo sapiens; identical to SEQ ID NO: 2334

SEQ ID NO: 3335 - DNA, 434 bp, Homo sapiens; identical to SEQ ID NO: 2335
  misc_feature 334, 340: n = A,T,C or G

SEQ ID NO: 3336 - DNA, 433 bp, Homo sapiens; identical to SEQ ID NO: 2336
  misc_feature 17, 22, 25, 28, 29, 30, 33, 35, 50, 58, 61, 71, 121, 319,325: n = A,T,C or G

SEQ ID NO: 3337 - DNA, 425 bp, Homo sapiens; identical to SEQ ID NO: 2337
  misc_feature 7, 9, 17, 18, 21, 31, 386: n = A,T,C or G

SEQ ID NO: 3338 - DNA, 276 bp, Homo sapiens; identical to SEQ ID NO: 2338
  misc_feature 16, 17, 19, 21, 23, 27, 29, 33, 34, 57: n = A,T,C or G

SEQ ID NO: 3339 - DNA, 78 bp, Homo sapiens; identical to SEQ ID NO: 2339
  misc_feature 26, 28, 37, 46: n = A,T,C or G

SEQ ID NO: 3340 - DNA, 252 bp, Homo sapiens; identical to SEQ ID NO: 2340
  misc_feature 25, 26, 27, 28, 36, 48, 57, 66, 69, 83, 104, 105, 106, 108,118, 123, 134, 187, 235: n = A,T,C or G

SEQ ID NO: 3341 - DNA, 425 bp, Homo sapiens; identical to SEQ ID NO: 2341
  misc_feature 27, 31, 33, 35, 45, 50, 65, 67, 70, 93, 102, 111, 143, 148,150, 157, 159, 162, 166, 207: n = A,T,C or G

SEQ ID NO: 3342 - DNA, 261 bp, Homo sapiens; identical to SEQ ID NO: 2342
  misc_feature 11, 31, 44, 48, 73, 83, 96, 131, 138, 185, 195, 202, 203: n = A,T,C or G

SEQ ID NO: 3343 - DNA, 203 bp, Homo sapiens; identical to SEQ ID NO: 2343

SEQ ID NO: 3344 - DNA, 124 bp, Homo sapiens; identical to SEQ ID NO: 2344
  misc_feature 8, 11, 14: n = A,T,C or G

SEQ ID NO: 3345 - DNA, 315 bp, Homo sapiens; identical to SEQ ID NO: 2345
  misc_feature 14, 18, 25, 30, 44, 52, 53: n = A,T,C or G

SEQ ID NO: 3346 - DNA, 272 bp, Homo sapiens; identical to SEQ ID NO: 2346
  misc_feature 50, 51, 65, 67, 130, 188, 214, 218, 226: n = A,T,C or G

SEQ ID NO: 3347 - DNA, 326 bp, Homo sapiens; identical to SEQ ID NO: 2347

SEQ ID NO: 3348 - DNA, 340 bp, Homo sapiens; identical to SEQ ID NO: 2348

SEQ ID NO: 3349 - DNA, 264 bp, Homo sapiens; identical to SEQ ID NO: 2349
  misc_feature 104: n = A,T,C or G

SEQ ID NO: 3350 - DNA, 208 bp, Homo sapiens; identical to SEQ ID NO: 2350

SEQ ID NO: 3351 - DNA, 221 bp, Homo sapiens; identical to SEQ ID NO: 2351

SEQ ID NO: 3352 - DNA, 142 bp, Homo sapiens; identical to SEQ ID NO: 2352

SEQ ID NO: 3353 - DNA, 440 bp, Homo sapiens; identical to SEQ ID NO: 2353
  misc_feature 2, 3, 10, 19, 356: n = A,T,C or G

SEQ ID NO: 3354 - DNA, 460 bp, Homo sapiens; identical to SEQ ID NO: 2354
  misc_feature 29, 33, 44, 47, 51, 190, 192, 196, 200, 249, 273, 283, 294,302, 311, 316, 317, 326, 331, 334, 340, 342, 346, 352, 355,357, 363, 381, 398, 403, 405, 425, 426, 437, 442: n = A,T,C or G

SEQ ID NO: 3355 - DNA, 375 bp, Homo sapiens; identical to SEQ ID NO: 2355
  misc_feature 5, 23, 24, 26, 257, 328, 329, 330, 339, 341, 342: n = A,T,C or G

SEQ ID NO: 3356 - DNA, 474 bp, Homo sapiens; identical to SEQ ID NO: 2356
  misc_feature 387, 389, 396, 404, 407: n = A,T,C or G

SEQ ID NO: 3357 - DNA, 341 bp, Homo sapiens; identical to SEQ ID NO: 2357

SEQ ID NO: 3358 - DNA, 197 bp, Homo sapiens; identical to SEQ ID NO: 2358
  misc_feature 4, 10, 33, 65, 99, 105, 109, 111, 121, 125: n = A,T,C or G

SEQ ID NO: 3359 - DNA, 335 bp, Homo sapiens; identical to SEQ ID NO: 2359
  misc_feature 35, 238, 255, 283, 309: n = A,T,C or G

SEQ ID NO: 3360 - DNA, 451 bp, Homo sapiens; identical to SEQ ID NO: 2360
  misc_feature 380, 395: n = A,T,C or G

SEQ ID NO: 3361 - DNA, 479 bp, Homo sapiens; identical to SEQ ID NO: 2361
  misc_feature 336, 360, 364, 370, 376, 377, 380, 381, 382, 386, 389, 390,391, 394, 397, 400, 403, 406, 412, 413, 416, 426, 432, 434,437, 438, 440, 441, 460, 461, 463, 465: n = A,T,C or G

SEQ ID NO: 3362 - DNA, 160 bp, Homo sapiens; identical to SEQ ID NO: 2362
  misc_feature 53: n = A,T,C or G

SEQ ID NO: 3363 - DNA, 447 bp, Homo sapiens; identical to SEQ ID NO: 2363
  misc_feature 33, 35, 40, 44, 46, 56, 135, 209, 225, 373, 374: n = A,T,C or G

SEQ ID NO: 3364 - DNA, 335 bp, Homo sapiens; identical to SEQ ID NO: 2364
  misc_feature 15, 16, 17, 69, 266, 274, 277, 279: n = A,T,C or G

SEQ ID NO: 3365 - DNA, 320 bp, Homo sapiens; identical to SEQ ID NO: 2365

SEQ ID NO: 3366 - DNA, 795 bp, Homo sapiens; identical to SEQ ID NO: 2366
  misc_feature 16, 22, 31, 36, 59, 107, 338, 344, 348, 409, 431, 439, 443,449, 457, 462, 467, 472, 480, 482, 488, 492, 500, 504, 506,519, 527, 539, 557, 602, 617, 618, 623, 638, 653, 674, 678,686, 688, 689, 698, 699, 715, 736, 758: n = A,T,C or G

SEQ ID NO: 3367 - DNA, 264 bp, Homo sapiens; identical to SEQ ID NO: 2367
  misc_feature 25, 34, 45, 51, 61, 90, 112, 147, 188, 240: n = A,T,C or G

SEQ ID NO: 3368 - DNA, 566 bp, Homo sapiens; identical to SEQ ID NO: 2368
  misc_feature 126, 135, 136, 145, 146, 147, 158, 159, 167, 171, 175, 179,181, 189, 197, 276, 281, 301, 311, 319, 322, 327, 329, 356,380, 393, 419, 424, 435, 506, 512, 532, 545, 547: n = A,T,C or G

SEQ ID NO: 3369 - DNA, 90 bp, Homo sapiens; identical to SEQ ID NO: 2369

SEQ ID NO: 3370 - DNA, 550 bp, Homo sapiens; identical to SEQ ID NO: 2370
  misc_feature 316, 324, 329, 338, 362, 366, 368, 370, 373, 378, 382, 396: n = A,T,C or G

SEQ ID NO: 3371 - DNA, 400 bp, Homo sapiens; identical to SEQ ID NO: 2371
  misc_feature 37, 244, 317, 332, 336, 347, 368, 382: n = A,T,C or G

SEQ ID NO: 3372 - DNA, 578 bp, Homo sapiens; identical to SEQ ID NO: 2372
  misc_feature 245, 317, 318, 330, 332, 358, 359, 368, 379, 383, 402, 405,416, 429, 440, 448, 464, 472, 475, 497, 539, 549: n = A,T,C or G

SEQ ID NO: 3373 - DNA, 408 bp, Homo sapiens; identical to SEQ ID NO: 2373
  misc_feature 13, 16, 30, 37, 43, 44, 46, 49, 50, 51, 55, 58, 60, 61, 66,77, 79, 80, 83, 89, 107, 110, 124, 297, 344: n = A,T,C or G

SEQ ID NO: 3374 - DNA, 186 bp, Homo sapiens; identical to SEQ ID NO: 2374

SEQ ID NO: 3375 - DNA, 274 bp, Homo sapiens; identical to SEQ ID NO: 2375

SEQ ID NO: 3376 - DNA, 319 bp, Homo sapiens; identical to SEQ ID NO: 2376

SEQ ID NO: 3377 - DNA, 433 bp, Homo sapiens; identical to SEQ ID NO: 2377
  misc_feature 417: n = A,T,C or G

SEQ ID NO: 3378 - DNA, 454 bp, Homo sapiens; identical to SEQ ID NO: 2378
  misc_feature 167, 326, 327, 341, 350, 355, 362, 379, 381, 394: n = A,T,C or G

SEQ ID NO: 3379 - DNA, 175 bp, Homo sapiens; identical to SEQ ID NO: 2379

SEQ ID NO: 3380 - DNA, 377 bp, Homo sapiens; identical to SEQ ID NO: 2380

SEQ ID NO: 3381 - DNA, 260 bp, Homo sapiens; identical to SEQ ID NO: 2381

SEQ ID NO: 3382 - DNA, 435 bp, Homo sapiens; identical to SEQ ID NO: 2382

SEQ ID NO: 3383 - DNA, 437 bp, Homo sapiens; identical to SEQ ID NO: 2383
  misc_feature 359, 374, 422: n = A,T,C or G

SEQ ID NO: 3384 - DNA, 328 bp, Homo sapiens; identical to SEQ ID NO: 2384

SEQ ID NO: 3385 - DNA, 450 bp, Homo sapiens; identical to SEQ ID NO: 2385
  misc_feature 392: n = A,T,C or G

SEQ ID NO: 3386 - DNA, 245 bp, Homo sapiens; identical to SEQ ID NO: 2386
  misc_feature 201, 211: n = A,T,C or G

SEQ ID NO: 3387 - DNA, 440 bp, Homo sapiens; identical to SEQ ID NO: 2387
  misc_feature 385, 396, 401: n = A,T,C or G

SEQ ID NO: 3388 - DNA, 334 bp, Homo sapiens; identical to SEQ ID NO: 2388
  misc_feature 6, 7, 8, 38, 48, 56, 67: n = A,T,C or G

SEQ ID NO: 3389 - DNA, 352 bp, Homo sapiens; identical to SEQ ID NO: 2389
  misc_feature 320, 333, 335, 339: n = A,T,C or G

SEQ ID NO: 3390 - DNA, 525 bp, Homo sapiens; identical to SEQ ID NO: 2390
  misc_feature 406, 415, 435, 453, 463, 486, 492, 509: n = A,T,C or G

SEQ ID NO: 3391 - DNA, 366 bp, Homo sapiens; identical to SEQ ID NO: 2391

SEQ ID NO: 3392 - DNA, 377 bp, Homo sapiens; identical to SEQ ID NO: 2392

SEQ ID NO: 3393 - DNA, 392 bp, Homo sapiens; identical to SEQ ID NO: 2393

SEQ ID NO: 3394 - DNA, 397 bp, Homo sapiens; identical to SEQ ID NO: 2394

SEQ ID NO: 3395 - DNA, 310 bp, Homo sapiens; identical to SEQ ID NO: 2395
  misc_feature 21, 34, 265, 272, 274, 288: n = A,T,C or G

SEQ ID NO: 3396 - DNA, 315 bp, Homo sapiens; identical to SEQ ID NO: 2396

SEQ ID NO: 3397 - DNA, 343 bp, Homo sapiens; identical to SEQ ID NO: 2397
  misc_feature 12: n = A,T,C or G

SEQ ID NO: 3398 - DNA, 183 bp, Homo sapiens; identical to SEQ ID NO: 2398
  misc_feature 26: n = A,T,C or G

SEQ ID NO: 3399 - DNA, 517 bp, Homo sapiens; identical to SEQ ID NO: 2399

SEQ ID NO: 3400 - DNA, 198 bp, Homo sapiens; identical to SEQ ID NO: 2400
  misc_feature 94, 100: n = A,T,C or G

SEQ ID NO: 3401 - DNA, 122 bp, Homo sapiens; identical to SEQ ID NO: 2401

SEQ ID NO: 3402 - DNA, 456 bp, Homo sapiens; identical to SEQ ID NO: 2402

SEQ ID NO: 3403 - DNA, 475 bp, Homo sapiens; identical to SEQ ID NO: 2403
  misc_feature 339, 371, 385, 387, 411, 425, 430, 448: n = A,T,C or G

SEQ ID NO: 3404 - DNA, 426 bp, Homo sapiens; identical to SEQ ID NO: 2404
  misc_feature 369, 385: n = A,T,C or G

SEQ ID NO: 3405 - DNA, 448 bp, Homo sapiens; identical to SEQ ID NO: 2405
  misc_feature 356, 365: n = A,T,C or G

SEQ ID NO: 3406 - DNA, 496 bp, Homo sapiens; identical to SEQ ID NO: 2406
  misc_feature 29, 34, 35, 53, 56, 373, 395, 398, 436, 479: n = A,T,C or G

SEQ ID NO: 3407 - DNA, 309 bp, Homo sapiens; identical to SEQ ID NO: 2407

SEQ ID NO: 3408 - DNA, 188 bp, Homo sapiens; identical to SEQ ID NO: 2408

SEQ ID NO: 3409 - DNA, 659 bp, Homo sapiens; identical to SEQ ID NO: 2409
  misc_feature 30, 58, 60, 181, 416, 475, 500, 507, 530, 590, 593, 603,611, 621, 624: n = A,T,C or G

SEQ ID NO: 3410 - DNA, 465 bp, Homo sapiens; identical to SEQ ID NO: 2410
  misc_feature 22, 375, 376, 377, 378, 379, 380, 381, 382, 385, 386, 387,388, 389, 390, 391, 392, 393, 394, 396, 402, 412, 416, 417,418, 419, 420, 423, 427, 429, 436, 437, 438: n = A,T,C or G

SEQ ID NO: 3411 - DNA, 124 bp, Homo sapiens; identical to SEQ ID NO: 2411

SEQ ID NO: 3412 - DNA, 440 bp, Homo sapiens; identical to SEQ ID NO: 2412
  misc_feature 358, 384, 398: n = A,T,C or G

SEQ ID NO: 3413 - DNA, 463 bp, Homo sapiens; identical to SEQ ID NO: 2413
  misc_feature 43, 340, 379, 424: n = A,T,C or G

SEQ ID NO: 3414 - DNA, 416 bp, Homo sapiens; identical to SEQ ID NO: 2414
  misc_feature 366, 402: n = A,T,C or G

SEQ ID NO: 3415 - DNA, 371 bp, Homo sapiens; identical to SEQ ID NO: 2415

SEQ ID NO: 3416 - DNA, 373 bp, Homo sapiens; identical to SEQ ID NO: 2416

SEQ ID NO: 3417 - DNA, 441 bp, Homo sapiens; identical to SEQ ID NO: 2417
  misc_feature 360, 393, 397, 401, 405, 411, 418, 423, 428: n = A,T,C or G

SEQ ID NO: 3418 - DNA, 341 bp, Homo sapiens; identical to SEQ ID NO: 2418

SEQ ID NO: 3419 - DNA, 639 bp, Homo sapiens; identical to SEQ ID NO: 2419
  misc_feature 443, 548, 574, 579, 617: n = A,T,C or G

SEQ ID NO: 3420 - DNA, 322 bp, Homo sapiens; identical to SEQ ID NO: 2420

SEQ ID NO: 3421 - DNA, 307 bp, Homo sapiens; identical to SEQ ID NO: 2421

SEQ ID NO: 3422 - DNA, 410 bp, Homo sapiens; identical to SEQ ID NO: 2422
  misc_feature 16, 29, 33, 37, 48, 56, 60, 275, 349, 380: n = A,T,C or G

SEQ ID NO: 3423 - DNA, 668 bp, Homo sapiens; identical to SEQ ID NO: 2423
  misc_feature 603, 638, 640: n = A,T,C or G

SEQ ID NO: 3424 - DNA, 484 bp, Homo sapiens; identical to SEQ ID NO: 2424
  misc_feature 410, 424: n = A,T,C or G

SEQ ID NO: 3425 - DNA, 379 bp, Homo sapiens; identical to SEQ ID NO: 2425
  misc_feature 109, 158, 223: n = A,T,C or G

SEQ ID NO: 3426 - DNA, 62 bp, Homo sapiens; identical to SEQ ID NO: 2426

SEQ ID NO: 3427 - DNA, 418 bp, Homo sapiens; identical to SEQ ID NO: 2427

SEQ ID NO: 3428 - DNA, 83 bp, Homo sapiens; identical to SEQ ID NO: 2428
  misc_feature 4, 10, 13, 17, 25, 36, 38, 48: n = A,T,C or G

SEQ ID NO: 3429 - DNA, 369 bp, Homo sapiens; identical to SEQ ID NO: 2429
  misc_feature 60, 63, 77, 89, 108, 138, 142, 160, 163, 168, 176, 214, 257,263, 305, 306, 333, 338, 340, 342: n = A,T,C or G

SEQ ID NO: 3430 - DNA, 475 bp, Homo sapiens; identical to SEQ ID NO: 2430
  misc_feature 256, 418, 439, 460: n = A,T,C or G

SEQ ID NO: 3431 - DNA, 486 bp, Homo sapiens; identical to SEQ ID NO: 2431
  misc_feature 114, 262, 277, 423, 424, 425, 438, 443, 455, 473: n = A,T,C or G

SEQ ID NO: 3432 - DNA, 506 bp, Homo sapiens; identical to SEQ ID NO: 2432
  misc_feature 381, 383, 401, 418, 426, 469, 476, 481, 491: n = A,T,C or G

SEQ ID NO: 3433 - DNA, 172 bp, Homo sapiens; identical to SEQ ID NO: 2433
  misc_feature 14, 17, 44, 45, 55, 65, 71, 90, 108, 116, 122, 130, 134: n = A,T,C or G

SEQ ID NO: 3434 - DNA, 592 bp, Homo sapiens; identical to SEQ ID NO: 2434
  misc_feature 20, 27, 68, 109, 110, 119, 142, 149, 204, 219, 251, 260,322, 327, 423, 454, 455, 459, 487, 492, 499, 510, 517, 524,545, 552, 579: n = A,T,C or G

SEQ ID NO: 3435 - DNA, 405 bp, Homo sapiens; identical to SEQ ID NO: 2435
  misc_feature 211, 215, 223, 226, 231, 235, 238, 241, 254, 281, 284, 286,291, 293, 303, 305, 316, 317, 326, 329, 331, 334, 336, 342,365, 378, 390: n = A,T,C or G

SEQ ID NO: 3436 - DNA, 147 bp, Homo sapiens; identical to SEQ ID NO: 2436
  misc_feature 116: n = A,T,C or G

SEQ ID NO: 3437 - DNA, 224 bp, Homo sapiens; identical to SEQ ID NO: 2437

SEQ ID NO: 3438 - DNA, 471 bp, Homo sapiens; identical to SEQ ID NO: 2438
  misc_feature 381, 398, 404, 412, 419, 434: n = A,T,C or G

SEQ ID NO: 3439 - DNA, 341 bp, Homo sapiens; identical to SEQ ID NO: 2439
  misc_feature 19, 81, 87, 94, 124, 138, 143, 149, 159, 178, 186, 235, 248,281, 299: n = A,T,C or G

SEQ ID NO: 3440 - DNA, 469 bp, Homo sapiens; identical to SEQ ID NO: 2440
  misc_feature 73, 389, 404, 417, 421, 431, 444: n = A,T,C or G

SEQ ID NO: 3441 - DNA, 285 bp, Homo sapiens; identical to SEQ ID NO: 2441
  misc_feature 26, 215: n = A,T,C or G

SEQ ID NO: 3442 - DNA, 438 bp, Homo sapiens; identical to SEQ ID NO: 2442
  misc_feature 14, 21, 31, 50, 60, 74, 101, 127, 131, 139, 145, 161, 332,337, 360, 365, 374, 383, 395, 401, 416, 421: n = A,T,C or G

SEQ ID NO: 3443 - DNA, 172 bp, Homo sapiens; identical to SEQ ID NO: 2443
  misc_feature 33, 138, 156: n = A,T,C or G

SEQ ID NO: 3444 - DNA, 191 bp, Homo sapiens; identical to SEQ ID NO: 2444
  misc_feature 33, 47, 85, 97, 119, 125, 128: n = A,T,C or G

SEQ ID NO: 3445 - DNA, 516 bp, Homo sapiens; identical to SEQ ID NO: 2445
  misc_feature 104, 126, 158, 164, 183, 198, 200, 203, 264, 303, 329, 333,407, 415, 427, 444, 451, 453, 463, 465, 470, 482, 492, 495: n = A,T,C or G

SEQ ID NO: 3446 - DNA, 503 bp, Homo sapiens; identical to SEQ ID NO: 2446
  misc_feature 97, 279, 397, 474, 490: n = A,T,C or G

SEQ ID NO: 3447 - DNA, 472 bp, Homo sapiens; identical to SEQ ID NO: 2447
  misc_feature 20, 23, 28, 43, 50, 52, 64, 92, 366, 368, 418, 450, 455: n = A,T,C or G

SEQ ID NO: 3448 - DNA, 476 bp, Homo sapiens; identical to SEQ ID NO: 2448

SEQ ID NO: 3449 - DNA, 353 bp, Homo sapiens; identical to SEQ ID NO: 2449

SEQ ID NO: 3450 - DNA, 326 bp, Homo sapiens; identical to SEQ ID NO: 2450

SEQ ID NO: 3451 - DNA, 140 bp, Homo sapiens; identical to SEQ ID NO: 2451

SEQ ID NO: 3452 - DNA, 245 bp, Homo sapiens; identical to SEQ ID NO: 2452

SEQ ID NO: 3453 - DNA, 373 bp, Homo sapiens; identical to SEQ ID NO: 2453
  misc_feature 305, 312, 314, 320, 325, 326, 328, 332, 336, 342, 351, 353: n = A,T,C or G

SEQ ID NO: 3454 - DNA, 412 bp, Homo sapiens; identical to SEQ ID NO: 2454

SEQ ID NO: 3455 - DNA, 248 bp, Homo sapiens; identical to SEQ ID NO: 2455

SEQ ID NO: 3456 - DNA, 455 bp, Homo sapiens; identical to SEQ ID NO: 2456

SEQ ID NO: 3457 - DNA, 443 bp, Homo sapiens; identical to SEQ ID NO: 2457
  misc_feature 386, 388, 389, 394, 395, 397, 400, 401, 402, 403, 405, 408,412, 414, 415, 416, 424, 427, 430: n = A,T,C or G

SEQ ID NO: 3458 - DNA, 397 bp, Homo sapiens; identical to SEQ ID NO: 2458

SEQ ID NO: 3459 - DNA, 554 bp, Homo sapiens; identical to SEQ ID NO: 2459
  misc_feature 20, 200, 420, 438, 448, 459, 463, 487, 495, 501, 520, 530,541: n = A,T,C or G

SEQ ID NO: 3460 - DNA, 131 bp, Homo sapiens; identical to SEQ ID NO: 2460

SEQ ID NO: 3461 - DNA, 305 bp, Homo sapiens; identical to SEQ ID NO: 2461

SEQ ID NO: 3462 - DNA, 601 bp, Homo sapiens; identical to SEQ ID NO: 2462
  misc_feature 491, 503, 542: n = A,T,C or G

SEQ ID NO: 3463 - DNA, 161 bp, Homo sapiens; identical to SEQ ID NO: 2463

SEQ ID NO: 3464 - DNA, 315 bp, Homo sapiens; identical to SEQ ID NO: 2464

SEQ ID NO: 3465 - DNA, 280 bp, Homo sapiens; identical to SEQ ID NO: 2465

SEQ ID NO: 3466 - DNA, 587 bp, Homo sapiens; identical to SEQ ID NO: 2466
  misc_feature 341, 480, 500, 502, 539: n = A,T,C or G

SEQ ID NO: 3467 - DNA, 485 bp, Homo sapiens; identical to SEQ ID NO: 2467
  misc_feature 455: n = A,T,C or G

SEQ ID NO: 3468 - DNA, 221 bp, Homo sapiens; identical to SEQ ID NO: 2468

SEQ ID NO: 3469 - DNA, 582 bp, Homo sapiens; identical to SEQ ID NO: 2469
  misc_feature 496: n = A,T,C or G

SEQ ID NO: 3470 - DNA, 223 bp, Homo sapiens; identical to SEQ ID NO: 2470

SEQ ID NO: 3471 - DNA, 536 bp, Homo sapiens; identical to SEQ ID NO: 2471
  misc_feature 465: n = A,T,C or G

SEQ ID NO: 3472 - DNA, 142 bp, Homo sapiens; identical to SEQ ID NO: 2472

SEQ ID NO: 3473 - DNA, 345 bp, Homo sapiens; identical to SEQ ID NO: 2473
  misc_feature 130, 312: n = A,T,C or G

SEQ ID NO: 3474 - DNA, 204 bp, Homo sapiens; identical to SEQ ID NO: 2474

SEQ ID NO: 3475 - DNA, 309 bp, Homo sapiens; identical to SEQ ID NO: 2475

SEQ ID NO: 3476 - DNA, 589 bp, Homo sapiens; identical to SEQ ID NO: 2476
  misc_feature 31, 473, 557, 561: n = A,T,C or G

SEQ ID NO: 3477 - DNA, 259 bp, Homo sapiens; identical to SEQ ID NO: 2477

SEQ ID NO: 3478 - DNA, 191 bp, Homo sapiens; identical to SEQ ID NO: 2478

SEQ ID NO: 3479 - DNA, 620 bp, Homo sapiens; identical to SEQ ID NO: 2479
  misc_feature 539, 557, 566, 593: n = A,T,C or G

SEQ ID NO: 3480 - DNA, 495 bp, Homo sapiens; identical to SEQ ID NO: 2480

SEQ ID NO: 3481 - DNA, 410 bp, Homo sapiens; identical to SEQ ID NO: 2481

SEQ ID NO: 3482 - DNA, 316 bp, Homo sapiens; identical to SEQ ID NO: 2482

SEQ ID NO: 3483 - DNA, 295 bp, Homo sapiens; identical to SEQ ID NO: 2483

SEQ ID NO: 3484 - DNA, 426 bp, Homo sapiens; identical to SEQ ID NO: 2484
  misc_feature 402, 412: n = A,T,C or G

SEQ ID NO: 3485 - DNA, 327 bp, Homo sapiens; identical to SEQ ID NO: 2485

SEQ ID NO: 3486 - DNA, 475 bp, Homo sapiens; identical to SEQ ID NO: 2486
  misc_feature 413: n = A,T,C or G

SEQ ID NO: 3487 - DNA, 307 bp, Homo sapiens; identical to SEQ ID NO: 2487

SEQ ID NO: 3488 - DNA, 305 bp, Homo sapiens; identical to SEQ ID NO: 2488

SEQ ID NO: 3489 - DNA, 326 bp, Homo sapiens; identical to SEQ ID NO: 2489

SEQ ID NO: 3490 - DNA, 286 bp, Homo sapiens; identical to SEQ ID NO: 2490

SEQ ID NO: 3491 - DNA, 223 bp, Homo sapiens; identical to SEQ ID NO: 2491

SEQ ID NO: 3492 - DNA, 575 bp, Homo sapiens; identical to SEQ ID NO: 2492
  misc_feature 295, 491, 506, 554: n = A,T,C or G

SEQ ID NO: 3493 - DNA, 527 bp, Homo sapiens; identical to SEQ ID NO: 2493
  misc_feature 35, 448, 501: n = A,T,C or G

SEQ ID NO: 3494 - DNA, 373 bp, Homo sapiens; identical to SEQ ID NO: 2494

SEQ ID NO: 3495 - DNA, 332 bp, Homo sapiens; identical to SEQ ID NO: 2495

SEQ ID NO: 3496 - DNA, 556 bp, Homo sapiens; identical to SEQ ID NO: 2496
  misc_feature 344, 368, 401, 409, 411, 445, 466, 484, 502, 509, 519, 530,533: n = A,T,C or G

SEQ ID NO: 3497 - DNA, 232 bp, Homo sapiens; identical to SEQ ID NO: 2497

SEQ ID NO: 3498 - DNA, 467 bp, Homo sapiens; identical to SEQ ID NO: 2498
  misc_feature 14, 18, 20, 38, 301, 383, 406: n = A,T,C or G

SEQ ID NO: 3499 - DNA, 124 bp, Homo sapiens; identical to SEQ ID NO: 2499
  misc_feature 4, 13, 39: n = A,T,C or G

SEQ ID NO: 3500 - DNA, 530 bp, Homo sapiens; identical to SEQ ID NO: 2500
  misc_feature 439, 463, 498, 506: n = A,T,C or G

SEQ ID NO: 3501 - DNA, 336 bp, Homo sapiens; identical to SEQ ID NO: 2501

SEQ ID NO: 3502 - DNA, 534 bp, Homo sapiens; identical to SEQ ID NO: 2502
  misc_feature 413, 460, 482, 489, 516, 517: n = A,T,C or G

SEQ ID NO: 3503 - DNA, 276 bp, Homo sapiens; identical to SEQ ID NO: 2503

SEQ ID NO: 3504 - DNA, 327 bp, Homo sapiens; identical to SEQ ID NO: 2504
  misc_feature 2, 9, 26, 30, 38, 47, 50, 64, 65, 115, 117, 121, 124, 161,167, 259, 265, 274: n = A,T,C or G

SEQ ID NO: 3505 - DNA, 277 bp, Homo sapiens
  misc_feature 29, 48, 81, 93, 103, 108, 111, 113, 125, 131, 134, 151, 168,171, 194, 195, 199, 216, 233, 248: n = A,T,C or G
ggcatcctttccccatggctgcataaaanaggattgaatcaaatggancccatcatgctggcctgcttctctccgctgggngccagggagcangctgactgcngagtnagntnaagacagacagnagtcanagngctgggcttttcctttnaaaaacacagcccgttnaanttcacagagacttgaagaatacnnatanaaccacagattaaaacnttgctttgacgggacangacaacccgggccanttgatcttgcttggggtttcagccccaat

SEQ ID NO: 3506 - DNA, 372 bp, Homo sapiens
  misc_feature 343, 345: n = A,T,C or G
gaagcaactgatgggtggaatggctaagagcttcaaccaaaggcacagagaaatcggggctggagccaagatttgaacacatgatctgaccctgtgtcctcactcttaatcaccatgctgtgctagatcattctagcaaaatgcttatatggtgctttgcacaacacaggtattcagcaaataaaggcagctgtgattagcataacacaggtagtttctagttcccacgagtgtcacctccaggaaagcagcgaccttgtctgtctggaagaatgcagcgctcccagcacctgacccaacgcacatttgagggatggatagaaaatgaatgaatgaaagtctntnccaaataacagaacttgcttccccaaa

SEQ ID NO: 3507 - DNA, 101 bp, Homo sapiens
cttccttgtggtcatagatgcaaagagatgtgtcatcctggtgaatgtccctttaactgcaaccagaaggtaaaacttagatgtccttgtaaaagaataaa

SEQ ID NO: 3508 - DNA, 536 bp, Homo sapiens
  misc_feature 26, 46, 87, 127, 152, 178, 191, 195, 212, 219, 228, 255,268, 269, 283, 308, 318, 357, 373, 401, 405, 431, 438, 458,493, 508, 511: n = A,T,C or G
ggtggggggtcttttcatttgccctncttggcccgaaataatcaangggtgggaaaaatgggcccagctttttctgggaattcaatnggacttggtgggcccggcctggggttggtaggcagcaatncgcttttcaaggaacataagcggtntggcttaccccggaggaatatttgcntgaaaaaagcttngggncgccgaaatggggcctngacccgnttgcttcgngcctttaaccgggaatcgcccgcttcnccgaattcgcaannggcaatcgcccttntatcgcctttcttggacgaagtttntttcttgaanggggaatcaaattcttctaagaacctcgcttggatcaancccttaagaactgggncccttttttaagtttggccaagcccatnttgnttggtttggcccccttccccccggtnccctttnctttggaccccttgggaaangggggcccacttcccaacttggacccttttgcctnaattaaaaaatgganggnaaaattggcattcggcaaaaaaaaa

SEQ ID NO: 3509 - DNA, 566 bp, Homo sapiens
  misc_feature 23, 30, 33, 42, 44, 61, 72, 73, 74, 84, 99, 101, 102, 106,114, 124, 140, 151, 153, 157, 181, 187, 195, 199, 200, 206,210, 211, 213, 236, 243, 260, 262, 270, 280, 294, 309, 321,330, 372, 385, 428, 435, 484, 541: n = A,T,C or G
aaggggcgccatggccccgaacngcggaangancttcgggcncngaacccaatggccaatncttggctttgnnnaaaaatcatngggggggaagaaatngnncggnttttattngaattcatcnaacttgtgggcccagntggggtggtgngngggnatcgcttatcaaaggaacaataanacgatngggctacncccnngaatanttgnntngaaaaaaacattggccggggggnaaatggngcttggaccggcttttncntcgttgcntttacagggnattcgcccgctttncggaatttcgcaaanagcaataagccnttcttaatncgactttctttggaccgaagtttcttttttgaaggggggatnaaattcttctaanaagcttcggccttgaatcaagccctcggactgggggccctttnttaaagnttggccaagcccattcttgggttgggtttggccccctttcccccccggnggcccttttccttttgaaccccttggggaaaagggggggccccctttccccaaactngggggggttttttctaaaataaaaa

SEQ ID NO: 3510 - DNA, 535 bp, Homo sapiens
  misc_feature 18, 32, 117, 121, 212, 322, 353, 378, 411, 497, 509, 513: n = A,T,C or G
ctcacagcttaactccgnaactggaggcagcnggatttgggcggtggttctttctggtgggaccctaaaaagcttcttcttcggaaggacacctttcaaaaaggaatgtggcccacnttgntatttcattccagcttgacccccagaaggggggttcatttttcttatttaccaaacaagggagaagctttcttagaactttttgggagggncaaagtcccagggccattggtgggttttcaaatccaaaggttattttgggattccccaaaagaaactcccacccagggaaattccttggtggacgggcctggttggatantgaagctccccaagttgggggaaacctgggnggaaataaattaaatttaaacttantttggggggaaccagggtacacctattacccantacctttccctttagcttaataaaaaataaccatggtcattattacccaacaggaaccaaaaaaacccttttacctgggaaatttnaaaaaataattntttnttggttttcccccaaaaaaaaa

SEQ ID NO: 3511 - DNA, 107 bp, Homo sapiens
agagaggatacccacttgaaccatacagctgccattttgggctgcaacaacgaggccagtgtagaaggagaataaagaaactggtgcatttggagtcagaaaaaaaa

SEQ ID NO: 3512 - DNA, 448 bp, Homo sapiens
  misc_feature 60, 67, 72, 75, 110, 129, 135, 140, 160, 165, 169, 175, 184,200, 203, 204, 209, 231, 232, 233, 237, 239, 249, 253, 256,286, 296, 297, 298, 310, 315, 323, 327, 329, 336, 347, 358,372, 376, 391, 393, 423: n = A,T,C or G
aagagccgtcctctggcagatatgtgaaagaactgcccatgaggagcgagaggctacttngcacacnttggnagnttaggtccccggaagacgggttttacagggcaccncaaggccgcttttcccaangccatntggcnaggggccccaagagggagcnccagnaagngcctgnattcaaaancccatgggtttgcctnttnnaaggnttggttttttccgaaccggggnnnaaangnttaggggganccanccntctaaatttccccaaaaaggctttttgcanggcccccaannnttttccttcaantcagncccttganccangncaacggncttatttttanccacccctttncatgccttttgggngggntttagctggcaaggngntatttttttttgtccctttttttgccaaantgctttgggcccctttgagttcccc

SEQ ID NO: 3513 - DNA, 291 bp, Homo sapiens
  misc_feature 226: n = A,T,C or G
gaggactcaagatgaggctacagaagtctggcagagcagcaggcctctcagtcagaaccactgactgtgtggcctcccggaaatgagtgtgccttcttgaacactgctgtgcttgcttgggatggaggcctgccacaatgccaaggagtagctactatatttcttcctctttgcagactgtgaaaaggcaatggactgtggaaagtcacgagacccaaggtggttncattttttgcaggatggctttgccttttaacctctgagtaaaagtgacttcctctccaaaaaaaa

SEQ ID NO: 3514 - DNA, 486 bp, Homo sapiens
  misc_feature 470: n = A,T,C or G
cttgttcaacttgctgttcgtgacaggatccaaccctaaatccagctccgtgagttgcctaagcctcagatttggccaacgagttacagtcctgaggctttcgctgcaccacggtgaagaatgtggtctctttctgtctgtgtggttttgctgaaggactcgtagagccgtctttgccacacagggaacagcctgcctgagaattacggccacatgagagaaattcatttgaccacccggatccagacagataccacctaaagttcctggagacacttgtccctttgtccttcttcccctccctttctgctccctccttttctccctcttctccttcctccctccccccaccccatttttcttggcttaagccagtgtgagttggattctattcttctgcaactgataaagtctttaaaaaggacaacacatttggaaagcctcaagagtgggaataaagtaaccacatnctaccccaaaaaaaaa

SEQ ID NO: 3515 - DNA, 537 bp, Homo sapiens
  misc_feature 181, 182, 187, 234, 242, 384, 516: n = A,T,C or G
gacttggtgcactgcaaggaggtcagggaaacagagacagagaagctgcttctccaaacttcagtgaccacacctgtgttcctgcagctgagtgtctctcagaatgggtgtctcttagggacacactgctgtagctcaacacaggagcattgccaacactttgagctggagaataacacannccacngatgagcctcttggaatgaccactgtggggacctgaaggatataaanatctttgntgaacaaacaaatgagaaaatgaatgaatgaaagaaacaacagctggaatcctatcagcttctgccaggtggcctcatccccactgctcgctgcctgttcggagataggaccttgaccagcccaccctcccagccttgcagntctgacttttggtggactgtcctcttccatgctcacttcttggaggctccaactttgtttaaggcaaatggaatatgacaaaggcaaccgtggccatcaaaatgccactctaaatgcccggaagtttaaagngggtcctcattttgcaataag

SEQ ID NO: 3516 - DNA, 323 bp, Homo sapiens
gggttgttggagttttaaagaagactgtggatagaaactgtccagctcagtgtctatgcctccagcagcttctcaggaacttctcctgccactattcaccatttcatgaccttcttctgcagacctctcttccccctcacagacaggctgcagcctggagccaggacacactagcaacctgagggcatccacgcgaggctctgggctgcaggtgtggagacccagggaccactcagcattttcaactcgtcatatgtcatttgggagggtcgccgcccctctcatggcctcattttattgccaataaaacactaaagaaaaaa

SEQ ID NO: 3517 - DNA, 386 bp, Homo sapiens
ttcatcccaagaggaaacctacaaaggaagcaggtgaagacaagagtacccagtgaaaacaccatctgcagcctctggctccagcagtggctcaccaccccagctcagctcacgcaaagcaaggtgaggctttcaggtggtgcttccctctcccacatggggagcatcttaaaccaaaagcaagcagaccagtggttttcaaactgggttctgtgaactgtggagaaccccagggaaacctgtggaggagcctcaagaaggccacaagctcaagggacaagctccaagcccatactccccatcagtgcctctctcgtctaatttacagatctggctctcacctaagagtgcagttaacaaaaaagacctcatggctaaaaaaaata

SEQ ID NO: 3518 - DNA, 134 bp, Homo sapiens
gcactacttggtttgggacaaagtcagaggcgaataaaagctcttcctgccttgaagaagcttacagttttgtgggaaaatgatctgcaatgggaatacatacgatatgacaaatgttctattatgaaaaaaaa

SEQ ID NO: 3519 - DNA, 144 bp, Homo sapiens
cgggactgggaggaacccctggagcaaactgtgaccagcaccctgcgcagtgcttggcatgcaacagacatcagccaccattcagcaacaggagcactgtgattgctcctaaaagtaaaacaaagcaaacacactcaaaaaaaa

SEQ ID NO: 3520 - DNA, 327 bp, Homo sapiens
  misc_feature 121, 196, 218: n = A,T,C or G
agtctgggcagagcagcaggcctctcaagtcaagaaaccactggactggtgtgggcctcccggaaatgaagtggtgccttcttgaacactggcttgtgctttgctttggggaatgggaggncctgcccaccaatgcccaagggaagtaagctacctaatattttctttccttcttttggcagaactggtgaaaaanggcaatgggactggtgggaaangtcaccgaagaacccaagggtgggttcccattttttttggcaagggatgggctttgcctttttaaacccttcttgagtaaaggtggactttccttcttccaaaaaaaaa

SEQ ID NO: 3521 - DNA, 426 bp, Homo sapiens
  misc_feature 50, 88, 101, 169, 201, 210, 229, 298, 306, 384: n = A,T,C or G
atgaagtgcttcgtgctgcatcctggctttcaccgacagggaaactggantttggttaacccaaaatcttctgggaaaaatatgggangcttagggaaaancccgttggccgtctggcagcttactggaacccagtggtggatagccccacttttaatcttggccagangcttcaagttccccacctggtacttaaggggntttttaaanggcccattggaagttgcangcccagcaaactttcaagtaaggccaccacaagcaactcctaaaaatccgccccttaatttggggggangggggganggcttaaagaactttaattaaacctttcatttatatttaatccgcccaaccagtgggttatgtctttcaatttatggncttaattaaatattcatttatttttaaacccccaaaaaaaaa

SEQ ID NO: 3522 - DNA, 501 bp, Homo sapiens
  misc_feature 20, 25, 34, 43, 90, 104, 108, 141, 146, 273, 284, 354, 483: n = A,T,C or G
gatgtccaaggacttgggangtagngtggaacangttgggccntttgggggctttcgggtgggcccaaccccaatggaacttacaaaaangcccccgaagaaangccnaagccaagcctttccccccgggcttcccttccnaaccnaaaggtgggccctcttgggggtggaatggggggaaaagcctttggtccttcttggctttttggtccaccaaccaccaaaaacttcttaaaaaagttcaagccattccccaaaccgccattcgggccnttgggaagaangccccgtcccaggggtggaagaagaacaccaccaccttgggaagggaatggtggtttgggggcccaagangggcaagaagcccaagccgaatggtccaccttggcccaagggtcccccgtgccaaccaccgaacaaccaccggggaacttcccttgggtttcccaaaaagccaagggaagaaaaaagctttttttcctntttccttccaaaaaaaaa

SEQ ID NO: 3523 - DNA, 477 bp, Homo sapiens
  misc_feature 30, 45, 55, 91, 122, 225: n = A,T,C or G
ggtgccgatctcaggctcaaacgccgaacnttctggccttccctngggttcaaangccgaattcttccttggccttcaagccttccccgangtaggccttggggaaccaccaggaaccagangtggaaagaacaaaatggtggtatttaactttgggtagcctttaatggaaacaggccaagggaaaaaaaacctggactgggccaacccggcccatgggaaaangggtggtggaaaacccggtaacccaccgaagggaacttcttcaccaattttaacattggtttaccttggaccttaagccgaaatggtcttaagggcccttaaaaaccaatcttggccccttctttaataagccttggtttttaattaatttaattggtaaaaccattgggcttaccaggggaattttcttggccattaaaaaataagtaagaatggacttcaagtggtctttcaaaaatggccaaaaaaaaa

SEQ ID NO: 3524 - DNA, 151 bp, Homo sapiens
  misc_feature 20, 26, 43, 89: n = A,T,C or G
caggctctgtggagcccagngaagangggcccctcaccaaganaccccggacccatggctgggcacccctggatctcaagaactttccnagcaccctaagaaacctattgaagaaaataaatggtctggtttaaacccaccacaaaaaaaa

SEQ ID NO: 3525 - DNA, 631 bp, Homo sapiens
  misc_feature 39, 56, 92, 101, 117, 158, 186, 228, 376, 378, 399, 419,500, 511, 529, 581, 588: n = A,T,C or G
agtcggcctcagctgtgtgccaacttcttcacttaaagnggctctgtgagaaaagnggaaaactctgcccctttcccgaacatgaaccgagngggaggaangaatgggtgggtatgncaaggccactgggcttccggggggcttcttggcaagaaagngggtggatccactggcaaggttccttgncaccaagtattgaaccttcaccaagggatggcctggaagtgncttactttcttacttccaagtttgggtccttcttggtggtaaaatacccgcccattggtcccccagaaataatggtgtctcaaacttattttaagtttgggctttctggccccgaggggaacccaagtggccaatttgcttcaccttngntttaaacaagccccgaaagangaaaactttttcccaaatgncccaagaaaccccgcaaccagaaagaaaaaccaggtcaaacttccaagccttcacttttttggtacaggcttcccaaagangccttcaattngaaaagaaaagtttggangggttgtaaagtcccggtaagggggggttccaaacttcctttatattgaagnttgagcnttcgttcccaaccaaaaaaaacctattgggttccaaaaaaaaa

SEQ ID NO: 3526 - DNA, 104 bp, Homo sapiens
agaatcttcacccgggaattgggccctcttggatcttgggactttccagcctcccagaaactggcaagcccaaattaaacatattggtggtataaatcaaaaaa

SEQ ID NO: 3527 - DNA, 108 bp, Homo sapiens
  misc_feature 31, 34, 37, 67, 81, 93: n = A,T,C or G
ttctccagctctccagacaccagctggatgnccntcntttcaattcactcacttctgaccctggggnacctgggatcagcntcagaccccacnggttaagggctctgt

SEQ ID NO: 3528 - DNA, 543 bp, Homo sapiens
  misc_feature 31, 41, 71, 107, 109, 133, 193, 276, 314, 332, 350, 355,357, 390, 392, 393, 395, 396, 399, 415, 424, 436, 444, 446,447, 449, 459, 488, 491, 506, 518, 521: n = A,T,C or G
ggcgtttgggtcaattactaccaaagaaccntttggcttantggatgaatggtggttcaaatcttaaccantaatgggggatattcccttcaaaaccgatacctaananaggccaaaggttttttctttcttnggtccaactttttcttgggggggccaaaaagatactttaacctttggggccaccttggangggtttgggccccttttcaaaaatggccaatggggccttcaacttccaaattttcttcatgccaaacccccaaaccaaaaggngtggtggataatttatggcaaccttggtggtttaccangatattgatagataaganacttggaatccccctttngatananatggccttaccaattccaaccccaagccccaangnngnnctnttttggccaagccttnagggatggngtggggaactgngttggaananncnagatacttanctcccaaaccttggtaaaatggcccaggngtncttcttcccaaatgngtaaaccttcanaanaatcttatacttcaaatttaat

SEQ ID NO: 3529 - DNA, 662 bp, Homo sapiens
  misc_feature 31, 51, 65, 76, 103, 114, 123, 125, 308, 347, 348, 351, 393,394, 431, 432, 445, 513, 544, 555, 597, 601, 606, 624, 632: n = A,T,C or G
gagaacgaattcgtaccgccctgggccatgnggtgcaagaaccgagggtantccaacgtgggagngtgccccccangcaaataacaagaaacgctttggggtnccccttgcaangtgggctcngngtccctggcccaagctgggcaagaaaaaggaaaaaggtggacctgggtgcttgctgggcaaacaggccatcgatgaatgaactgtaaccaagaacaggggcaagaatgaacagctgggaatttctttgaactgggccaacaagggccacaatttcgccttccccaaggtgaatgccttggganggggggggaacaaagtttgaaaaggtgggaaccggggannatntccgaatggggggccctgggaaatacccttgccgccctgaanncttgccaagcttgtgggtgaacagcttgaaccttganngcttcaaaccgangcccccgcttacgcccaacgccttgcccaaacaatcaatgaaaagcccaaagataaattaataaaatnccgaagaatgttcaaaagccctggggggaanccctggtgggngggaaccttgaaccttccaaaacttcttcttggggaatcaangggnggaangaaaccccggcccccaancggcaacngggcccgcggtttaaaagggtgggaagaaa

SEQ ID NO: 3530 - DNA, 599 bp, Homo sapiens
  misc_feature 25, 26, 45, 57, 79, 102, 126, 127, 130, 154, 202, 261, 265,309, 329, 350, 425, 449, 450, 451, 479, 571: n = A,T,C or G
gcgggataaaaaattcatgtaaganngcccgaaatcgattaaagngttataaaaagncaacattttccttttgcatggnctggatcataatggggtgggaanaggtgggcaagaaagggaatcttnntgncaagacctggatgatgataaacangtccacaaatactggccttcaaggatgccaccccttgctttgaaaaangtacccatcttgaaccccttaaagtgggcccccggtgggtcctttccccacaagaagancgtngaagtctcctgggcttcaaggaaagtgggcccattggttcacangaaacccgttggcttgtttngcaagggtcttcctttttganttccacaaggaatgcaaggaaaactggacttcacaagataccaatctaatctaatcttgtctggtgtcctggggngtggcttcaacttggccaccacannnaagggatgctctaatgtttcttttgggntttcaacaataccgggtgcaagcaataatcccaagctgggtttctgctcccttgtcaccatgaaatcacccaataagcaccctggggtaatnaaaatatgttgggctacccaaaaaaaaa

SEQ ID NO: 3531 - DNA, 231 bp, Homo sapiens
  misc_feature 41, 147: n = A,T,C or G
gtcagggaggtgaggcagcccaaggtcacacttgagagggnggggcaaagctgagcagtgagccaccatctgcctgattccagcagaacagccctcggactcaatcacaacgcagctccagtgatgcactacaccttatcagagagngagggaactgctctaaatcttaaaacaaacattttaggggcaagaagtgccaaccttgaaactccagactgggataaaagaaaa

SEQ ID NO: 3532 - DNA, 401 bp, Homo sapiens
agctgagaagaagtgaagaatcctgccaagcaagagcagtatgtgcataagagaacgaggccctagcccaacatgcccttcctccgacatccatccaaggcacacctcacaggtcacctgccatgttcattctggagaaaacacagcttgaactgactgctcaggtgacatggaggtagatcccaggaaggaaggaagggagagcaggaaagaaattgcctgggggttgaagagctaccgaagagaaactacccagccacgaaaccacatttattgagctcgacccataagagaacaggtggtagtgaaatgaaaattgtaacttttctcttgaacttgaaatcaatttggaggtatatatatttaatggattaattcaaaggaatgctgaatgaaaaaaa

SEQ ID NO: 3533 - DNA, 500 bp, Homo sapiens
gatgctgcagcgtccccactggcctggccaccactatctgcccctctgacataagctgtcaatgtgaagtctgcctacccagcacctgtcctcatgagatcagcctccttcagcccacctgctgtgaacctggcccctgcccggctgcgtgcctgactcctatgtgccatcctgttgactgctcaacaaatgccacccagctccaaccctgagcgggctctctgtcaccacctgcatccagagtgtgaaccaccttgctgctagccaaagagcttgcccacattaccctgaggaccttcagtagtcattaagcgctgctcagcaaatggcctttaatgaggccatttggaagaaaatatagcactgtgccttcagttttacagagggtttctttttctggtttgaacaatgatttcaaatgagaaatgggaaaaaaaatgctaccatggatcctcttacttcaaaactaaataaacaccactactccccaaaccaaaaaa

SEQ ID NO: 3534 - DNA, 464 bp, Homo sapiens
  misc_feature 388: n = A,T,C or G
ggctggatctgctgaagccggggccagaggcctgtgctgcccccaacctgggaacctccagaccacactgatgcgaccgctgcctcccagttcccaggaacagatactgagctctgagcaatgggcacaatttcagacccagcgtcctggcggtgccataaaactgcagcagcgaagctcactggagtcattttctcctgtgctgctgacacggagaggaaaaatccccaaataaagctcttcccacagccacagccacgaaaacattgtcccctgcaactgtgctcgctactcaaacatgatttctcctcctcagggggaaaaacctcccagcaattctcattgcaagatggtaaacctgtcgccctaatgaacaggttttatttanaacccagcgagaagggacgcaccgggagacggcagctttgttgactgcgatgtttccaaatcacttgctcaacctg

SEQ ID NO: 3535 - DNA, 344 bp, Homo sapiens
  misc_feature 81, 154: n = A,T,C or G
atccccagttggaggaaccatcctttacagctgactgactcaccagtccctaatgctggtcagatgtcctgaacaaggaangccgtgatttctgcgaccagagagaatcggtcagtcacggtgtccctcagccaaaatgaactcagcctattgnctccggaagctggtaaatcggcagctgaagaaacatacagttctgtgtttcaaaatgcaaaagaccacatttccctgacctcgggtgctcgctgacacattcccaaccaatgactataaatctgctcctggattgtggtaagttgagaaattaaacacaaatatcccatctgataaccttcaaaaaaaaa

SEQ ID NO: 3536 - DNA, 366 bp, Homo sapiens
  misc_feature 107, 167, 196, 286, 300, 337: n = A,T,C or G
caacaatgcacaagggttccaaattctccgtgtcctctcccaggccaccctttaaaggtccccggcttctttctccagcagccccttgggctgcttcccctcccagngtggccaccatggggctggcacaaacagtcacacaggatctggtgtgtgcaccctctcanggcttggcaagctggaggctgtggaccangctgagcgcccgtcagcagcacctcacctttgggcagtcttctgacagcacagccaccccagcctcccccaggcctgggccctcaccagncggtgcctggcggnctcccggatccagcggatggtggccatgtactggagntttacaaaaacccttaacttgaaggaaaa

SEQ ID NO: 3537 - DNA, 320 bp, Homo sapiens
agtctacagatttcactgaatcagatgactgaattgaacttgagatgtgatccaaaaaagaaagcttctgtaaaattcctgaaagctctttggcagcgcatttcactgtagtgggcatctacacatctgagaaaattttgataatgggaacatgaaaggggatgatagagaaacaatgacactcagcagaagtaaaagctcttaacacctttcatttcagctttatgaagcgaaaagtacaatacatactcccaagatcattctgtcctttactggtaaacgacacttggtgccaataaatctatggagaaattaaaaaa

SEQ ID NO: 3538 - DNA, 397 bp, Homo sapiens
  misc_feature 319, 324, 328, 335, 336, 339, 344, 345, 346, 350, 351, 353,354, 358, 361, 376: n = A,T,C or G
cagagagatgcactgttgagattacccttcaggaaggacttgctaccgactacaggggacaggaatcagcagacatcctccagccatcagcttcttcaggatctacctcagcgtcaaggaaccacctgacctgaggtctcattcttccttgggcagactacatcttataacaaagtgagatgtacccatagggtcaagctccagcacagagacccatcctgggctgcaggacttggtgccaggaagtcccagcatctacttgtttccaaagttatttgggtcagcattttcctccacccaccacttaaaactgatttgnttcantccnttggaannggntggannngccnnanntccnggncccaccctggcctgntccctttttttacctactggg

SEQ ID NO: 3539 - DNA, 408 bp, Homo sapiens
cccaccccaaaacaggcctcatgtggccaaacaggagccttgagaagagctgcagccaaggaaatttggtcaagtccaagtacatgcccagcaaggggatctgcttaagcagagtcatgaagttgatcatctcccctgatggggcagaatggacatcacccccactgcctccctgccagcagagaaatgtgggacaggcctggaagcaagaggtctcctcagattagaggggaagctctctctgcctggggtcagagctggagcagcatgggtgtaaaggggtcacggccccatgtgctgactcccaccaggtgacccccatggcacctggggaaggaagcaaaggggccctggccaggacaccagcagcatccacagcacctgctaatcatttttgctggagtaacc

SEQ ID NO: 3540 - DNA, 160 bp, Homo sapiens
aaataacacgcaaataagtacaagaaagatgagagcgagagagagagaccgtgagcgcaagaattacacccggtatggaagacgactctaaataatgtaagtcttaggggagccagccatcctagagcagattcccataaaaatcaaaccagaaaaaaaa

SEQ ID NO: 3541 - DNA, 481 bp, Homo sapiens
  misc_feature 361: n = A,T,C or G
gatggaaattatctggttcccccctggatatgatcaaccttcatagactgtgcattatacatgtagccatctctgcgacctgcaaagatgaaaagggaaagcaggagatggaaactggtcagcagccttctggtttatcagccacacttacaaaggtcaaatgtgcaaagcgtcagaagacagtggttagagtgagattctacatgctctcaatgaagaataaagcatgcaggaagaacctttcaaaaggttacaaccagagacctgaaggaagcaaggaagaaagccacatggttgtcaaagagaagaggaaaggagatcactaagctggatgacgttttctgtttcttttgaaaccagnaaaaaatgacaagtttagggagagatcaaaggtcatactgtgaagcacctttggataaatggcagggactttggattttctttttgaatataagcataatccattgaaaggtctcatgca

SEQ ID NO: 3542 - DNA, 324 bp, Homo sapiens
  misc_feature 213, 216, 268: n = A,T,C or G
tgaaaaggcacccctgctccatgcctgatcctctcatctgagcctgatttggccccctcaactcctcagctgctggctccatcagtgatccactcctccttcttcacacacccactgtgccaccgccctccccgcagcactttcacatgctcaggtgcctcctcagtaagtgcaacactccagcccttgccctactcctctggctttcttcgnggncaaagcctaatggagaaaattgcatctacaattgcaaaattctggtcctcgnctccatttactttacacaaaaaggattctacacgggcggccacaagttcttggtgg

SEQ ID NO: 3543 - DNA, 409 bp, Homo sapiens
gaaaatctaatgtaatggatgcacttagttttgtaatgggagagaaaatagctaatttaagagtgaaaaatattcaagaactcattcatggagcacatattggaaaacctatttcttcttctgcaagtgtaaaaattatatatgtggaggaaagtggcgaagagaaaacatttgcaaggattatccgagggggatgctcagaatttcgctttaatgataatcttgtgagtcgttctgtttacattgcagagttggaaaagataggcataatagtcaaagcacaaaattgtttggtttttcaggggaactgtagaagcaattttcagtggaagaaaccccaaagaaaggacccagttttttgaggaaatcagccttcaggagagcttataggagaatatgaagaaaagaa

SEQ ID NO: 3544 - DNA, 435 bp, Homo sapiens
  misc_feature 329, 349, 351, 358, 372, 377: n = A,T,C or G
tggctggaacccctttcgtcaatggcctcccatgaatggtgttgctaataaagcctattaatgagcttccacggcggagtgtgaataggtaaataagccccaatctgttgaggttctggggcaagggcagaaaagccagtaagaactaaaggtgacagtttgaactgaactgcgaacgccagcaccaggtttcagctgaaagaaccgccagacaaggacacattcacagttcctccaccccctactgaggtctcttttcttcgcaattttcccccctttacaaaatgtcttgagtagtcaccctttttttttttaaaagcccttgaaanccccttttttttttaacttnanaaagganccctcaaggggganggaanaaaaatgggggcccccaaactccgatgcccccaaaagttttaagaaaaaaaatgggct

SEQ ID NO: 3545 - DNA, 127 bp, Homo sapiens
  misc_feature 24, 58, 88: n = A,T,C or G
ttccaaggaatttcttactttaancattttcttggtggggtaccttggctttccaaangggcttggaaaaaagaaccattcttgggancttaaaataaccccttattaaagtttttggaaaaaaaaa

SEQ ID NO: 3546 - DNA, 329 bp, Homo sapiens
  misc_feature 26, 37, 40, 41, 49, 53, 54, 75, 229, 235, 308: n = A,T,C or G
cggggcgcagagttcaaaaaggggcngttccctactnatnnatcaattnattnntcctgccaggcacaggggatntcagcataaacaagactgaacatggccccttgccttttcaggctttgggggagtggacaccagatttggagggcagggctctactccaacctagcattttacaatctggtgacctcacttgctcttaaactcttctgagcctcagttccttcangtgcangatgtgtgtaatgatgcctcctcgtatgattcaagtgaagtgggaaggatttaatcaaataaataagaaaagnggttggtaaccataaaaaaaa

SEQ ID NO: 3547 - DNA, 363 bp, Homo sapiens
  misc_feature 53, 338: n = A,T,C or G
gaggagctggagcccactttgcattacctggttgcagagttcaaaaaagtggnagtttcctactcattcatctattcattcatcctgccaggcacaggggatatcagcataaacaagactgaacatggccccttgccctctcaggcttggtggagtgacaccagatttggaggcagggctctactcccagcctagcatttacaatctggtgacctcacttgctcttaaactctctgagcctcagttccttcaggtgcaggatgtgtgtaatgatgcctccctcgtatgattcaaagtggagtggaagggattttaattcaaattaaaataaagaaagntgttttgttaacccattaaaaaaaa

SEQ ID NO: 3548 - DNA, 355 bp, Homo sapiens
  misc_feature 25, 28, 36, 37, 41, 48, 53, 55, 56, 57, 65, 69, 73, 78, 125,135, 144, 198, 211, 227, 266, 273, 276, 309, 336: n = A,T,C or G
tgacataaattactcccacggcggntgnccaacctnngganagaaacnaagancnnncccagaanagcnactngtgcnccaggacaggcctgccctggggacccggttataaggtcataacctgnccactgatgngcatggaantttgggggatgacttttctttcccacgttgtatctgggcgaaaaacaaactggnacctttacatctntaatgggccccaaaanccaatcttttatgtgggggaagccacaaaaaaaaagggntcctgcnttnttcccggggccacaaggattatgggggcaatancccacatgccctgagcattacataagnggctcattttgggacaaaa

SEQ ID NO: 3549 - DNA, 522 bp, Homo sapiens
  misc_feature 312, 341, 432, 455, 462, 463, 476, 483, 488, 507: n = A,T,C or G
ctattggatgactccctgagaataaggataagatgctgggctccagaagagcaaatggtaaatgagtggtggctgctgtctgaaggacagaaggttacccatatggtattcctagaattccactaaaaacaaccctggacccacttctgaaaatgggcaggaagttactcggaaggggctgcccactccattcaggatgctacacatctgggccatgaccatatctctacttcaagccctgcgttctgacaactgcatcatcttttgtgaaatagccatgacaggatttgctaattttccttttcaaaatgntcttctttaagaaaaaaaagtaactttanggtaatcacctcaatgagcgtatgaaaaaaaggttaatggccaatgaacctaaaaatcttggcccattcccaggcacacaaacctttactncatgaaatttactcagggggccnaaaaccnnaaggccttgacangggatcnctggnttgctaacccacttgtggnggaaaaaaaccctta

SEQ ID NO: 3550 - DNA, 559 bp, Homo sapiens
  misc_feature 24, 35, 37, 46, 51, 69, 74, 79, 89, 99, 129, 154, 181, 187,190, 210, 216, 239, 393, 410, 413, 419, 432, 435, 444, 459,463, 474, 490, 525, 538, 543: n = A,T,C or G
gaagaaatggtagaaggttggatngttgtcgggantnccgaccttngggtnttttaacccgcttggggnaggcnttttntttggcttgnttccaacccnaaaaagccaaggggggggggggaatcaccntttttgacccaaaaccttgcttggnccatttcccaaaatttcttggggaaanaagccnccnaaggaacaaaaaaaatcccnggggangaagcccttcattggaacccaanaaacccgcttggggaaattaagccgggggcctttcgggggggcccttggaagccttggggaagaagtttggaatgggcaaaggtcttcaagtcaaaggggcaccttcaagcttcaaaaaataccccccccaccccttggtttggcccattttantaaagaaagccttgggnaantttaanggcccaaaaatanttngggacccangggaaaatccttggnaaanttttccttggngggttttggggaaaanttttgggaatgggaaaggggtccaaaaaaggtccnaaacccccaaaantttcntttggaaaaaaaaccc

SEQ ID NO: 3551 - DNA, 304 bp, Homo sapiens
  misc_feature 17, 26, 58, 74, 89, 90, 106, 124, 134, 139, 146, 155, 165,172, 175, 187, 201, 216, 237, 259, 263, 272, 287: n = A,T,C or G
tggggctatttccgggncttaatggntaggcctttgagcccaccgcttagccattatnacctgggacctggccngatacattcagatgnncctgggaggcaactgnaagaaacccccaaactanagcgtaaccngcaanttactgngcttaactnatggacaggncccccgntgnggaaattggtcncttggcggccctanactatatcaaattgncctttggggacatttcccccngggggaatgaagtttcatggancttnttccccggngcccctttgggaacncggcccttgggccaaaa

SEQ ID NO: 3552 - DNA, 431 bp, Homo sapiens
  misc_feature 297, 405: n = A,T,C or G
ggtggctgggggaaagcaaatcaggaaacagaaggaatcaaaggctactgtacagagagcgaatgtggattaacacacaccagccatcatgtccaggcagggccagaagccacaggggtcaggaggatcccacaacgtcagagcctgccctgggtgcactcactacccacggtcacccaccactttcaacatctgcctctgatgaagtccctgccttgccagtggttgctgtgcctggaaagggacagcacctgattcaggaggagtgaaccatcgctgcgggagaaacacacctgnctggatatagtcatcatgagtcagcagcaactcatgtctctggcaggtgccaaagcttcagggtgaacagcaaagttctttataaaatacagtatacaccgtggctgngagtattaatctacagacagcaatga

SEQ ID NO: 3553 - DNA, 671 bp, Homo sapiens
  misc_feature 21, 30, 34, 82, 87, 88, 95, 115, 130, 132, 137, 141, 143,147, 153, 199, 204, 205, 206, 213, 217, 222, 226, 229, 230,231, 252, 258, 303, 310, 332, 333, 335, 344, 347, 354, 360,368, 373, 375, 385, 388, 402, 435, 441, 445, 454, 468: n = A,T,C or G
  misc_feature 473, 474, 487, 489, 508, 512, 513, 517, 519, 527, 530, 546,547, 552, 570, 606, 622: n = A,T,C or G
gacgtctgggggagctacctngcatttaangtcnagaaactggaaggacactagcaaatctttgccttggttttactttaanagaanncccatgncttggggttaaaaaaccccntgctaaatggcccancncccanttgncngaantggggnggaacccaggaatttcggaaataaataatggtcccaaggggttttnaccannnaatgggngtgnggcgnaatnccnnnccactttaatggaaaaaatancctaanttcaaaaacccggtacccttggaatggggggcgaacctggggaanccagggnaaaaagaatattgaacctgganngnaataatttnagnggcaaancccccnaaaccccnttggncnttcccatgtnttnggcacaaccttacntttcgaaaaaaccaatcctccttgatgaccccnggtttngttnccaaccaanaaaatgggccaacnttttnngaaccccagtacntnttttttaagggccggaaanaaanncctncnccttgggnttnccaaaaggggacaatnnagggncccttggaactcgtggancccttaaccccggaatgaaccaatttatcccctcgngaaaaaaaagttcccncttttttcccttgggaattcaaacccttggcctaaagaaaagtttataa

SEQ ID NO: 3554 - DNA, 420 bp, Homo sapiens
aggctgccctgtggaatgcaaccaagagctccaagaagagccatgctcaacactgctgtccaataccactgccctctggaatgccctcagaccagcgagaagggtcagctcagaagacaggcctaaattcccccacagaatggagaatggccccggaccctgcagaaagaccccaaggcagaaatcccacacagggagctccttgtccatggacagtccggccactgggaagggccagagcatctgacagatcttaggagagcgagaccaggagaagccacacacaacaccttctgaacttggagatggcagggggctggcagtccagggggcaggggaggtggcctggaacctaaggcatggtctttttggtttctaatcctcgattactgtttttctgccaactgctttccctgcagg

SEQ ID NO: 3555 - DNA, 458 bp, Homo sapiens
  misc_feature 27, 50, 66, 67, 68, 77, 78, 88, 91, 94, 95, 132, 134, 136,170, 174, 175, 188, 203, 217, 225, 227, 233, 327, 339, 345,357, 362, 370, 421, 438: n = A,T,C or G
actgagagaacagactccggacccccncaaaaaataatgttttctgctcnccctctgggggcctgnnncaaaggggnntgggttttantgnggnngcctggggaattacaggaaggtacaaggaaagccgantnanaaaccagcataagagacctggggaagaaaggganccanngtagatcatcacnccattacctccatcnatttaccactatgnatgatggngnagattntggccctcccaaaaaataggttcggccaggcatcatggctcatgcctataatcccagccacttttggaaggttgaggtgggtggcttcaccttnagggcaaaggangttttnaaaaccaagggntgggnccaaaaantgggtgaaaacccccgtctctactaaaaaattacaaaaaaatttatccccnggccgtggtggacaggnccgcccttgttattcccaac

SEQ ID NO: 3556 - DNA, 435 bp, Homo sapiens
actaaactcagagccatccagtgtttcatggaagcattgcaaaatcccagtcctgtgaataccagaagccaaggcataatgaggaattcagaagaaaaaaacgtctgccagggatgattttccctcaactatatactaaactccaagatgagttaaaatctgcttttatgattctgaggaaaaccgcagaagagtgagagacaaatgagtgaaaaagaaagatttatccacacatctggataaatgtgtgaaaaaggaaacaattttttttaatctaccatgggaaagatcaaaagaaatatcttggaggactgtgaccatcctgtagtatgtggactgaaactatccccataatatgctatgaaggagcacagcattctcaaagaggagacttcatttggttagaaaaataaatgatatttatgtgaaaaaaaa

SEQ ID NO: 3557 - DNA, 293 bp, Homo sapiens
ggtggcagtgacctccggccccctggcccccttcgagacctctgaccccgctggactccggaacacccgtggtgaccgccgggaccctgcctgtgactctccaggactctgcgaccccgggatggatattgcgatgctggtctcgaccctgaaaccctccctcggatctgtgacctcggacccgtactccatctgccgcatctccattccgggggccttccctcgggtccccggcagaaagacattttaccccttcttgccaaaataaaaaaggattcgtttttaaaaaaaaa

SEQ ID NO: 3558 - DNA, 359 bp, Homo sapiens
  misc_feature 298: n = A,T,C or G
gggatagcccagagctattccattgtattccatggatgggcacatttggaagtttggttctaaaatctaaaagaagaaatttaagtgtgctgaagataactgcaactccaaacgctgtgtaattctatgttctgccattttgaagcaaagtggaaccagaagtgagaggattatttctaggtcatgctacggttaccctgaccccagtcactccctatgctggtccatccaaactcagagccacgatcaaggcccttctacaacacagatctgattacttcactctcttttgtggggnaaatataagcccaagaacccaagcaggtgcactgtggaggaagggagaatgcaaaaaaaaa

SEQ ID NO: 3559 - DNA, 308 bp, Homo sapiens
aggctacaattaaggaccaatgggtggaacttcaaaggaggcaaatgcaaatgtaatctcaaggaatggtagaacttttcaacagagttgccccactctggagagttggaagtccccatctcaaaaggttcatgatgcatttcatccattgtcaacaccttggccgttgaattcacagatatgctcagctgtcaccttctctctcaagcctgttttccagaaccaacacagaaatacctgaattctacttttgtcattatatatcaagaggtctagataaaataaaaatgtacctaaagggcaaaaaa

SEQ ID NO: 3560 - DNA, 374 bp, Homo sapiens
ctcactaattccagaggagagaagcagaggtgaaaatgaagaaataaggaaagcaggaaaggacgccctacattccaaaggttatttactagagtcagcatagatgtgcttgtgacacagcctggggatcagtgacgcttcctttaaggagtcttcatcggagattggaaggatgaggagttaaataagcaattctgggaatgtgagagagttccagacagagagaaccatctttacaaaaaaagctgtatatttttcatctcactggcgaatatcacaaagtttagtaagcatatggagacaaaattctcttttacactgctgatgtgtgtaaatcaggaaatgctcataaaaacaatttggaaaaataaaat

SEQ ID NO: 3561 - DNA, 427 bp, Homo sapiens
  misc_feature 31, 40, 41, 42, 63, 64, 87, 89, 103, 116, 129, 132, 145,150, 156, 169, 176, 193, 205, 216, 226, 234, 251, 334, 339,345, 353, 369, 410: n = A,T,C or G
ttgaatacaaggatgtggtcaactatactgntcttaccgnnnaaaaagaactgctgaggccanncatggtggctcacacctgtgatncnaacccctttgggangaccaagcaaggngggttactttttnttnagagttctacacnctaanaacganagcaaacgctttngcgcctnttttttcatcccaaaanagggggaacccnggggggcccantcaaactttncttagaanatctttttaaaataggnaaccccccttaagggccaagaaactgggttttttttttgtccccctggtttggaaaacccaggatcttcaattttttgggggnggggnacaacnggggcccntttaaaaatttttggngaaaagggccctttaaaaattttttttccccccctttaaantttttggcaaaaaaaaa

SEQ ID NO: 3562 - DNA, 351 bp, Homo sapiens
  misc_feature 275, 313, 327: n = A,T,C or G
gattccaattagaatacaccgtttactgcagaaaatgtgaaacttgcagaagagcataaagaagagaataaaaatgaccactctgccctctccagagataaacactcatcttgccacaagcctggacatggcctcagaatccatctcaacagagggatccaggcagttcttatcaatcaaatggaattaacatgccgtattaaacctgtttgcaatcttggagctagagcactgtagatgcttagagaatatggagacaagagagctcaggaggncaaggctgcagtaagcccaggggggacttgcccccaancctaatggacaganagagaccctgtctcataaaaaaaa

SEQ ID NO: 3563 - DNA, 469 bp, Homo sapiens
  misc_feature 355, 384, 431, 454: n = A,T,C or G
ctctatctatcaatcctccaatgtctgcgattaagaagacataaagtgacttgaaaaaatagtccttcagagttgtgtcatgtgtgtgattgcttctcaaaaggaaaaggtgaagccgattctctgcacacaggatataattcagatcttgagcttgaggccctgatctgtactaggctaccatattcattttcatctgtgaaggcttcacctacctcgggactcaacaataaaccagaccagtatggctctatcttcatgaagaacatacacaatacttcaggactcacagaagtcgatgagcagaacacagaagactcaacctgaagaaattccatatccgtgctactcctgnggtagtggtttaaataatttatataaaanggccgaacctagaaattcatatcagaatctatctatatatcacctgnaggttttaaatataatcatgggnatggttaaaaaaaaa

SEQ ID NO: 3564 - DNA, 469 bp, Homo sapiens
  misc_feature 20, 197, 221, 290, 337, 421: n = A,T,C or G
aggaggaagttgcagctcanaaaagaggcaagaatcatccaagtgacacacagtgacttggcagcgttggagctgggacgagaacatgagcttgggtcaccaccttgcacagccacaggggaagggtggctcctcgaaaggtccccagagctctccttcaatcccggaccacatgcttcctccttccaactatcagntccaactatttagcagttgctggntttgcacaaggagaactgggagtagtcggcatatcgttggtttgcagatgggtccaccagctcagcagntgaagacaatgcccccttcaaccttcaggttaaaaacattttttttntttaggccgcatccgcataaaaatcaccagggactcttgctaaaatccagctccctgggtcccatgtcagagtaggaagatganggacttcattttcagaagctcctctggtgacttttagaataaagcaag

SEQ ID NO: 3565 - DNA, 368 bp, Homo sapiens
  misc_feature 337, 344: n = A,T,C or G
ctgtggggtggcagaccatgtggcgtgacctcccctgttctcagacgcagcgatttccaagctaaagaacagagatgctgcagttaaagaagagctaaagtcctgctccagaacttgctggctgtttgacttcagggcaaattaacctctctgaacttcaatttcctcaactgtaaaaaagatgcactcaaatgttaattgctcaattcctactcttcacttttctaataatactgaatatgaaacacttcaactggtagagacttaattacattttcagtatatattattatctccaaataaaaatgttaacaaaaccatctaaaaataaacactnacttaanggttatgggatattcaaaaaaaaa

SEQ ID NO: 3566 - DNA, 119 bp, Homo sapiens
  misc_feature 44, 92, 94: n = A,T,C or G
gaagagtgaactggacatgaacttgacccatgatgctgaggatnaccagctgtgaatatttgagttcaaacgagaagggctcccaaagccgnanatgattaccctaagcaccttgtcat

SEQ ID NO: 3567 - DNA, 262 bp, Homo sapiens
  misc_feature 24, 224: n = A,T,C or G
aaaagaaaactgagctccgagcantgaaggaagttgcagatgcacataaaacttaaaatggcagagggaggaatcaatgcagacatggagttctgaagcttttgctgttgctctcagtgcatttctaaggaaacccaacggtatccatttcattgaccaattgctttgtacccaaaattttatttttcataagagtttttcattttctgacaaaaactatttgntaaaataaacataacttcataattctgatcaaaaaaaa

SEQ ID NO: 3568 - DNA, 188 bp, Homo sapiens
  misc_feature 53, 72, 100, 119, 126: n = A,T,C or G
aaaagactgttagaccatgtttattgaacaacgtgttatgagataacttttangatggtttggggccatttnctcaatctctgtaaaaggttttatttgntattttcctttgggacttncattggnactattactttttatcctcccactggtatcatttctctcacccctaaaacataacaaagaca

SEQ ID NO: 3569 - DNA, 104 bp, Homo sapiens
  misc_feature 28, 30, 36, 57, 76, 80: n = A,T,C or G
gcccaaaaccccccgggggggggaaacngnccgggnggggcggtttaaaaagctttngaaacacccgtttttttanaaanccaccttttttacccccacacagg

SEQ ID NO: 3570 - DNA, 111 bp, Homo sapiens
  misc_feature 79: n = A,T,C or G
tctacccgttttaagtccaactgaggctctcaagaagtgaagtgagagaaacagaacctacttcacagggtgtttgaangattaaatgagatgaaggatgtgaaaaaaaaa

SEQ ID NO: 3571 - DNA, 119 bp, Homo sapiens
  misc_feature 97, 102: n = A,T,C or G
aacagacccattcacctcaaacatcgcttggggcacaagccccttttcagaagattaagaaacatttcccaatactacaaattaaattaaagctccnagatntgaactatcaaaaaaaa

SEQ ID NO: 3572 - DNA, 149 bp, Homo sapiens
gagatccaagaaccgtctctctcgggactgcatcaggaaccctttcatgacctggaagcccaccccgcccctcccccaccgcgccgtcgagtcctcccagctttgcttcaagttgtcttgcctttctagacctgccccgtctttccaga

SEQ ID NO: 3573 - DNA, 205 bp, Homo sapiens
  misc_feature 42, 62, 70, 73, 78, 88, 97, 114, 115, 121, 129, 135, 147,156, 159, 188: n = A,T,C or G
gcagcaccaccatgcccagggacaatggacttacatatgttngcccggcctggcctcaaacntccctggngcnttaanacaatcgccntcccccagnatactggccacccatanngccttnccaaatancgcccnttggagattacntgggtgctnaangtcgtcgccaaggcaacctttccttttgnaaaagggccaaattcgc

SEQ ID NO: 3574 - DNA, 564 bp, Homo sapiens
  misc_feature 17, 25, 37, 43, 64, 75, 87, 113, 162, 166, 177, 203, 237,259, 267, 276, 281, 301, 305, 313, 325, 351, 354, 397, 405,412, 419, 427, 443, 444, 453, 458, 468, 472, 478, 482, 490,506, 521, 524, 538, 547: n = A,T,C or G
caaaaaattttttcccncaaggacnctttaaaggggngttggngaagcccccctttaatccttnccaaaattggnggggatcccccncggggttggggaggaatttgggggcnccttttttgggggaaaaaaaattaatttttttggatttttaaattttangggngccttttaaanggggttttggggacccccctttattncccaatttggggaccttggggggggtcttttttntttaaggaaaaaaaagggggancccccttnccttggggnaaggntttggccttgccccccggangggnaaaaggancccttggtgggnaaggaccccccggcccagggaaaggnttngggccccttttttttccaaggccccaaggggaggaaggaaagnccccccangggaggnaaaaaancccaaaanccctttaaccaacccnncccttttgnggccntttgggaccntttncccagnaacnttcccagnaaaccttgggtaaagnaaaaatttaaaaatnggngctttaccttgggntttaaaagnccccccccaaaaaaaaa

SEQ ID NO: 3575 - DNA, 193 bp, Homo sapiens
  misc_feature 48, 52, 56, 98, 99, 103, 109, 137: n = A,T,C or G
gcaagagatacaccaagctgagcaacaagaaaagatctactgaaaggnctcnttgnctttaccaagaaagtcagccgtggaccctcaggtcacatagnntgantatggnctcaccttttgagcaggtgcagcctggntaagtccaagctgaattggcctcgctggccatttaaatggccgcttttggcccaat

SEQ ID NO: 3576 - DNA, 458 bp, Homo sapiens
gtacagagaagagaatggtggactcattttcatcctgaagcacaggccaccgtatttacagtgctgattcggttgcttgcggggagagggatgttggaaaccagcatgataccagtcgtctggatctgaagcctctctcagcctaacctggtttaggcttaaattcaagaatcctctactttcttattacctcaggaatccctggctctagcttctggacccagcatggagtccccaatgaagttcagttattccaataatacaaatatgccatcaaacgatatgtggtgggacttctacaaggctgggcattgcagcccttgttgccatagagatttgctagccctaccacaagccagccccaaacccctccttccaccacatccagtctccagggttactaatgcctgtcacagatgcaaagatgcttgagaagcacatgggatggtgcaataaaa

SEQ ID NO: 3577 - DNA, 171 bp, Homo sapiens
  misc_feature 24, 25, 52, 91, 93, 109, 121, 126, 131, 135, 153: n = A,T,C or G
agcacgccctttttggagcaaagnntcaagccctgagttaaagtccaagctngaattggcctcgctggccatttaaatgggcgcgccctcnanggaattcggaatccgncgcgccattttnaaatnggccngctntgggccaaattctttttngctttttaacccctggga

SEQ ID NO: 3578 - DNA, 197 bp, Homo sapiens
  misc_feature 32, 55, 58, 61, 72, 77, 118, 137, 150, 156, 166, 169, 171,178, 179: n = A,T,C or G
caacaaaatccagtctgcaaaagtcctctggnaaaagcctcatttttttaccaancanaangcagggagaanaaagnggagatgaagagagaccccatatttaaagagaaccttaccnggctatacacacagggcangcgcttacctctnatttanactcctgatntgnanaccgggnntttagacacttttacacc

SEQ ID NO: 3579 - DNA, 115 bp, Homo sapiens
  misc_feature 79, 87, 92, 99: n = A,T,C or G
tctcccttttcgagcaagtttcagcctggttaagtccaagctgaattggcctcgcctgggccatttaaatggcgcgccntctgaggnaattntggattnccctcgcgccatttta

SEQ ID NO: 3580 - DNA, 239 bp, Homo sapiens
atgagcaaagcaaggcttaaagagctaaggagactgtgggaatgaaggtttcgaagtggtctgaatggagaaagaagcggtgggagagctgagtcatcatgcagcacacggcaaggtagcagaaaaccctggagaacaacagcagcctgccccagagtcagccgtgagcgctgatttagtttcaggaaaacaataacactttgtcccattaaattaatgttgttaatttgaaaaaaaaa

SEQ ID NO: 3581 - DNA, 452 bp, Homo sapiens
  misc_feature 336, 343, 363, 372, 375, 376, 430: n = A,T,C or G
tacctaccgcactgggttcttctgaagaccatttgggtggatcaacatgagagcatgcagagcgaggccaggcacgtggtcagtaccgtataggcatcagctgttacttttgcttcctggaagaggcagactgttaactggaccttaaagaagagaaatggaggagaggaggaccgggcctggagaggagggccaggcagagcaaaagtagtcaagactggggaaagagctccaactatggtttttaccagcttataccaaaaacccttgacatttgctcacaaaacaaaacatcccactcattttgaatagtagcctgttcacatagttcatggntcaaacncgaaaagtccaagggttttncccgggganggnntccttcccacccttggggcccagttccttgcttatcctaccaaataaattcttntgtgcataaagtgaaaaaaaaa

SEQ ID NO: 3582 - DNA, 295 bp, Homo sapiens
attaagaccaactgagggtgataaactcaagcaccaggtttgggaccctactgtctaatcatcagtgacggtttggaatttaaggagctgtttaatccccttagacacctgcaatcaggttaccccataatctgatgagaagcgttcctttagctgtgtttcacctgacatgaaaataccaatatactcttccactcaggaatcctgcttctcatctaggactaaggctgttcaatgcaaccatgctgaagagtaccatgttttcagccaggcgttgtggctcacacctgtaatt

SEQ ID NO: 3583 - DNA, 247 bp, Homo sapiens
attgaagcttcgagaccacctgggaaaatagacaactaatgtaatgaatatccataaccagtttcagagacaaccagtagtttgcaagttattccacccattaaacgattccaaatgttggagaaaaggcccccaacttaaaatactccacggaaacgtgctctatacatctatgtggtgcttacaataaaagatgaattcctgcgactgagttgcaaccccgaaagaaatgatttagagaaaaaaa

SEQ ID NO: 3584 - DNA, 339 bp, Homo sapiens
gtgatgcgggaagctgcctgcgacatctgtgacagatccagacctcccaaccatatggaaggttggacagtaccaaacatttgattggatccagagtttggtgccacatttgactgccaacctcctaaaaggcacacaggccgtcttgagttaaagatgaaggctctgtggtatcagataaactgagacataaatcctgtttataatactctggggcactgctcttagataaattacttgatctctttaagttgaagtttccttatttgtaaaattatgatggtaattgtttctatttcatggagttaataaaagataaaattatgagagtaaaaaaaa

SEQ ID NO: 3585 - DNA, 362 bp, Homo sapiens
  misc_feature 337, 347: n = A,T,C or G
gtctccagggaggagagaggaaccattttcactgaagctaagcacagctattaaggagcagcaggagcaacggacacacgcaattatagaagacactattgaaagaagctgctctaaagtacattcagtagaatggactcttaactgctaaggcttggggggcccagccaaggtatccaagaaacgcttcacagcctaaaaagggtttttgttttagtttttgcaaattactttcctgaaccccgtataggtatttatctcagaaagggaatatttggttaaatgagccatacattgataagatacatatacaggtgttttttttttgcattttganaataaaagtnttcttgaaaaattgt

SEQ ID NO: 3586 - DNA, 118 bp, Homo sapiens
  misc_feature 96, 100, 103: n = A,T,C or G
gagctctttggcaaatctactctgtataccaactcaagaaaaacagggaaaaaaccccaatctgttctttctcattggggggccaataaaaagcanccanatntttttgaaaaaaaaa

SEQ ID NO: 3587 - DNA, 234 bp, Homo sapiens
  misc_feature 132: n = A,T,C or G
aaaatttcttaatgaaagcgatgatgatgtcgaccttaacctccagaatgaagatacttcaggacttagtctgagaaggcttacctgtgcgtatattagaagtcttcccggtgccaggaatcaacaaagagntgagtaacgaagaactaatttaatcagctaatttggagaaactaagtcttacaactattatttagttcatcaaaacaaataaatctcaatgagaacaaaaaa

SEQ ID NO: 3588 - DNA, 354 bp, Homo sapiens
  misc_feature 223, 296, 298, 299, 321: n = A,T,C or G
agcctccctcacaccaaaacaccggaagacttgagtgagcagatcaatgccacaggcaaatgactcagtgaaaatcttgaatgtttgctaagatctcctgcagcatcccaggtcaaagaggctgactcagagggccctactcccactgctgtccctgacacacattggagaggccttgagacatgctgcctctgaagtcggtatcatgtgactcacaacctanatctgggggacatggctttagtgggtgggtgtggtttgcccttcaattcttaagaatttttttttaacaagtngnnggcatttctttgtttaatgatnggaaaataagggctcaatattaaacatttggga

SEQ ID NO: 3589 - DNA, 160 bp, Homo sapiens
atattaatccaaggaacaatactgacgaatttcacggacaaaatactaagaaggaaatcaagtgaatcaagcggagaagaaagacagtggaaaaagaaaactgaaaataaaaatattttctagaccccttgaaataaagtttgaaaaaccacaaaaaaaa

SEQ ID NO: 3590 - DNA, 186 bp, Homo sapiens
gtgcaatggctggagacggagcagccatctggaacaagacgtcgttttcggaatggagaatgaagaacatgcaacaagacagaagaaagtcgttttcctgatactgtggacccatcacaccagccctgcactacctcataccagatttttatgtcatagaatcttttttttttttttttttggaaa

SEQ ID NO: 3591 - DNA, 462 bp, Homo sapiens
gcaaatgggagctactaaaatttttggagttggagtggaatatgagatgtctttcaagaaggttatcatgcagtcctgaaagaacagacatgctgattggcacagagcggcaggaagaatataaagacaccatgaagctcttaaactgcgatctgttcatttactcctgtttgaattggaagaataggagctgacgtttggatggggtcttaaaagtcatcttgtgcaaccttgcacccaatgccagaattactggggctacacactctgattgaatatcttccctgaagagaggggcactggtgcacagaatggcccaggcatgagtgaacatctctgctccacaggtccaggaggcagaaaggcatagggaaaaggccacggcctctgtcttctaagacctgggctcaaatccagctctgcccctgtgaacagggcaggatactccctgagtcttgcttt

SEQ ID NO: 3592 - DNA, 129 bp, Homo sapiens
  misc_feature 50, 60, 61, 66, 78, 84, 89, 105, 106: n = A,T,C or G
cacttaaagcatacaagcctgatgcgtcggctgggggagtcatcacaaangcggcccagnnggtgngttatcaacccnaccatnacatnggctaccaaccagtcnnaaacttactgggggggccacact

SEQ ID NO: 3593 - DNA, 465 bp, Homo sapiens
  misc_feature 349, 363, 369: n = A,T,C or G
gtttagggcacagacagagatttcaattttgtgtacaaagaagaaaggacttgggaattgggctgcctactttacagaagactctggccttcaagccaggagagagaaaaagttattaaagggaaaaagacttatcctaatttgccctcaggaaaacccaactaggaagaaaaataaggaatttggggaactgaacccacctttcttcctcagttcctctaatacaatctggatcgactccacaggaagctttcctggtttaaggttaagggaacggcatacacatgagttgggtaggataaaaattttcagagccagtcccatgttgagaaacacctgcccctttctnttccacaaaaatanttgggngcaattcccaacatgatatgaattggcatttcctggatattcaaaggaggaaggtaaagagaaactcttccaattaaaaggagctttatgtgattg

SEQ ID NO: 3594 - DNA, 470 bp, Homo sapiens
  misc_feature 165, 199, 202, 204, 205, 208, 210, 221, 226, 233, 237, 240,243, 252, 255, 257, 258, 260, 282, 287, 304, 318, 335, 344,348, 356, 364, 367, 407, 411, 414, 419, 420, 433, 435, 440,450: n = A,T,C or G
tggcctcgctggccattccacatgttaaaatagtgaaggagcatgttcggcacacagtggaccgaacgtggggtaagtgcactagggtccggttaaacggatctcgcattgatgaggcaacgctaattatcaacatatagattgttatctatctgcatgaacacnaaatctttacttgacgacttgaggctgatggtgnttntnnttntnaaccactgagnttaanatgcggnactnttnganattctgtcngcnannangatgatacgtataagcggttcntaacncgcctttgatataagtntgataaagtttttncagctgaaaagacgatnaatacactnaaantgattacnaggatacnganagaggtatgtacatgtgtatttatatactaaaactgccgncggntgnttgcnngaccgagaaaaangntagcnagactcgggncattgtatcgtatgcgcctg

SEQ ID NO: 3595 - DNA, 458 bp, Homo sapiens
  misc_feature 368, 369, 372, 385: n = A,T,C or G
caaccttcaacatctacagagaaggaaaaactcattcgattcattggagaagatgaaaatgttcattccaaacctctatttgaaacagatgtgttgccttcctggagagagtcagctaagcaaggtacattggcccaaaaatatcttgaagcaatggctgtaattgaacatatgcaggagaagttactggaggttgaaaatagagccagacaggcagaggagaagtttgaagatgcatatgagaaacttcatcatacccttataaaaaataaagatctagaggaattagtcatgacatcaagaaaggagtctaaagaagagaaagaaaatcaagatgaaagagaagttaaggagaaggaggaccaccnngangaagaagaagtcnggtcagcagaaaattcctcaaaatctccaaagaaaggtcactgaatccaaggcaacctgtggaaagaagaatt

SEQ ID NO: 3596 - DNA, 225 bp, Homo sapiens
  misc_feature 91, 104, 118, 131, 146, 165: n = A,T,C or G
tgaaaaggcacccctgctccatgcctgatcctctcatctgagcctgatttggccccctcaactccttaactgctggcttcattaagtgatncactccttctttntttacaaacccaantgggggcaaccgnccctcccggaagaanttttacaatggctcaaggngcctcttcaagaaagggcaaaaattccaggcccttggcctaattcctttgctttcttttg

SEQ ID NO: 3597 - DNA, 475 bp, Homo sapiens
  misc_feature 373, 455: n = A,T,C or G
actgttgtggctgttctaggcaagtttgtttttccatattgaaacaaagaaacttgctgagatttttattgtaattactttgtctgcatatcgatttggaattaactttggaataatattggatattacaagccatggaaaatgttacaatgtcattgctacatgaagagaagatcaagagaattcagccagaagactgtagaaacaaagtcatgaatcatgctgtccttggataacccggtgtcacccagaatctctgtatcccttggaaatgtagactttctccaaccgcctctccctccttggtggcttctctgcctggacagacttgtctttgtattaagtaagtgtcactttacctcctactactcangaacagaccagccagtcccatgacaaatttccacaaaatgccatgtatcttgtaaatttaatgaatcactttgggaaaaggngggacacagagagcttaatt

SEQ ID NO: 3598 - DNA, 426 bp, Homo sapiens
  misc_feature 17, 87, 350: n = A,T,C or G
gttgttaactaagtcangatacctgatcctacacacagcctatccgagccagggccaagccatctgtcaatttgtttcagctacacngacgagaagtaatttttaagggatcacacactaaggatcaggacgtaaacccctgtttgttccctctaagggatgtgtgtccaagtgtggactcaaatccacatgcagctttcatctgggccagaggggcacataagcagtgtccctgctggccaggccatggagacacagagccgggggtctagatgcccctgcttctgctgcaaagaagtgggcaaagcttctggtctggacgcgcaactccagagtgatttgcaacgccnggcccaggaagaaacggaatatgggaatgtaagcacagactgcacaagggcctcatcaataaaagacggcttggaa

SEQ ID NO: 3599 - DNA, 152 bp, Homo sapiens
  misc_feature 32, 46, 53, 61, 72, 84, 86, 96, 106, 107, 115, 124: n = A,T,C or G
taccctggaagaagtactcataaggccacctntgttatttaccccnaatcttnacagaganaaggctgcccnccttttgagcangntcagcctggntaagtccatnnacccacangctcatgcntatgctttttaccctggaagaaatactt

SEQ ID NO: 3600 - DNA, 444 bp, Homo sapiens
  misc_feature 16, 38, 40, 43, 54, 61, 92, 97, 107, 168, 181, 191, 233,245, 325, 334, 349, 356, 370, 372, 389, 406, 411: n = A,T,C or G
gttttaattcgaaacntaaacccccaaaatccttaatntncanttttttggaancaggccnttggcttgggcttggtccctttacctttccncaaanttcttccttnccaaggaaaggggcgaacaaaggttccaagcttggaggtaaagggggggaaaaattaaagnaaactttcttgancaaaagggangcttggcccaacttttggtgggggcatttccaagaagaaccnttggtgcctggnggaaggggccctttccgagtcccattcttgggttttaaatccttgggcatttgggaggactttggacaaaacccccaaancccagaaangggaaaaaaggtgantttggtnccccaaaggatcancncccagcaccttggaagnaaaaagtgggattgaanggaanggggggccttgaaaaaaaacttggatggggctc

SEQ ID NO: 3601 - DNA, 311 bp, Homo sapiens
  misc_feature 85, 171, 202, 210, 225, 230, 245, 280, 287: n = A,T,C or G
catttgagaagactggctttcccttttggtagaaagccccagcgcctggtccaacagaggtgcctgggttgctgaaagaagccgngggggagcatgaaaggtcccggccagtggacaagccttcaaccttggcttctttctggtggccacaagtcctgggtgaactaaagnttaaaatggaccacacctacccttgccctancttgcaanctgaagccaaccctnctaantctcacaaaggaggngccactgccctgcagtctcttttaactccccactncctggangttcatggccaaactctgtggcct

SEQ ID NO: 3602 - DNA, 163 bp, Homo sapiens
  misc_feature 29, 31, 46, 61: n = A,T,C or G
tgctcggcaaagatgcccgcattccggtnanagccaagggggttgngagcttccttaaagnggaaacaagcaccgcttgcccggaaagcccggaggaaagggtcttcctttgggttttggcctttccttctttcccacttggcaagtggaaccttccattggc

SEQ ID NO: 3603 - DNA, 257 bp, Homo sapiens
  misc_feature 78, 89, 100, 108, 115, 125, 158, 162, 195, 203, 206, 224,239, 241: n = A,T,C or G
cggaagagagccacattcagccaaggccattctaaaccaagttggttccttgtcctttactaattggcccagcacaangtacacggatngagcttggaanccattatncttaacnaactaatgtnggacaggaaaacccaatattgcatgttcttacntatnaagggggagcttgaacaaccagaacacatgacncagggganggnaacaacacacactggggncctgtccaacaagtnanggttgaaggcaaggaa

SEQ ID NO: 3604 - DNA, 432 bp, Homo sapiens
  misc_feature 344, 348, 369, 396: n = A,T,C or G
acccctctgtgacatggcaagtgatgctcatgaaggccggcggagtctccaagcagcaccacctagaccgtccgggcaaagcgcctgtcacttcacatgcagccccaggaagggacacagagcagtcttcggcctcagtcctcccaccttctgtgatcagggccctatatttggattttgatctcggcctgacttgctgctaaatctgtaaccagttactcttacagggttgtgggggaggagtcatgttgctatggcaatccaacaactctgggagaaggagaggagaggaaatggaatttcaaggcccgagaccaccaagactcaaaaatacccatttctgngtgnggggccccacaaaatgaatcnttgatatgctaaaataacagacctctnttttttttttcccaaatttccaaccattgacaaaag

SEQ ID NO: 3605 - DNA, 413 bp, Homo sapiens
  misc_feature 367: n = A,T,C or G
gtgtgtccaggatctcagagacaggaatagagaacatgctggcccacacaagggctcctaaggcttctgtctgaaagtgacattccacccacttccacccacattttgttggtaagagcaactcacatggccatgcttgaattgaagtggatgaagaagtcaactcctaccatgggcctggcataaaggagacttgaacatctgtgaacagcctggatgactaccataatgacacctcaccaagagcccctgcccactccatttcacctggcccatcgctgcaggacttcccactgtgcaggtgaatgctgccagggaaggagggagagagtccatggagggttcaatttctaactggtgctatttngcttccttttttggggcaataaataggtaaacattgtcatggcaaa

SEQ ID NO: 3606 - DNA, 388 bp, Homo sapiens
atgcaggcttcctctttatgcgcaaatggaaatgctctgagcagtacttattctacctgaacatagaggaaggaagcctagatggctggcagaggagcacagccccacgtgaagatttcagcacctgtcccttctctgcccgacgacaatggaagagcaggcaccgtgagatcctgggctaaccacctcctccccgcagcacaacgcaacatcctagctcctggtctgcggttccccaccacccagcggagacctgaactcagtctgaggaaagtctgatgccgccatttctaacttaaacagtatttgccccacttctaggtaataaacttatgggcagggctttgaccctaataaaataacccctttattaaccggaaaaaaaaaa

SEQ ID NO: 3607 - DNA, 402 bp, Homo sapiens
  misc_feature 362, 363, 387: n = A,T,C or G
gacttctggttgctgctgctatttcaaacactgtcaaggacctccattataatcagccacctcctgctgaggacttctcccctcaaaccagcactcaattcatccagacaagacttttagctgagacatctgtggtctacaatggaatgaaaccagaatcaacaatctggttaaactgcacagcctgtctcatttatatatggttattttggtgcacatttgagctttctttgatttgcaaagtgaaaatgccaactttttgattattaatatatttcaattattttataataagaagaaattatgtatgtgctatttatgggctaataaaaatctcagctgaggtgaaaagatgagcaacnnggccaaataaaaactgaacctttntttttaaaaaagaaa

SEQ ID NO: 3608 - DNA, 177 bp, Homo sapiens
  misc_feature 37, 71, 106, 108, 126, 140: n = A,T,C or G
atttctcacagactcttctgctgctaagaggccacanttatcctggcacttcttaagggactctcatgagngggcgccaggaagagcatgtgtggaaaaagtgcananaagttgcatataaagaancaactgtaaacganattataaaaatatctttgctttcctcccaaaaaaaaa

SEQ ID NO: 3609 - DNA, 431 bp, Homo sapiens
  misc_feature 30, 338, 341, 358, 360, 366, 372, 390: n = A,T,C or G
gtttcaccctacagacaataaactccacangcctgcgggggaagtgtgtggaaatgttctgggagatgcagcagctggtcccttgtgacgagccccgtcctgccttcatcgatgaactctacaaggatgtcatccagggcccaggcgtcttctttttggttcacttccaacacctgaaccctggagagcaatggggcatcggttcaacgcagagattccagaaaggatcatctttgcctcaaattaccatgaaatggaaaacatataaaaagactccaaaacgccatgattttactctatactagaaataaaaaactaaggccttcaaaaattcaagnggnggattatttaaaggatncngaagtntaaaancttgtacttttgaataanagtaaatccttttatctaacaacataataaaaattaacata

SEQ ID NO: 3610 - DNA, 355 bp, Homo sapiens
gaggtgatggagcaggggcagggagaggcagcccaggaggtcgtgcaggcagaagacatcatcggcggggcaggggtgggggagcaagagtgagagaggacaccacacagtgacctcgactggcacaggttggaaggtgggaaactgtggcctatcacagaagtaccctcttcttattagtcctgggtaaggaggtggcactgacctggtcctgaaggatgaataggagtttgtcagggagctcctggttcctctgattcctcctcctaagaacgcatagaccagactggtttctaggtttcctagaagtccagaacaaggccacccctgaaacagctgtgtctcaaaaaataaa

SEQ ID NO: 3611 - DNA, 303 bp, Homo sapiens
tgaatactgaagcttcaaaagaaagaacatagacaagatttctacatcttttacactggttattgtataaaatggaagagaattcatgctgaatacatattgactcctgactgcctcccagattcactgccagcatcagcatgcttgactaggagagtcaggagggccctgccaagtctgatgcactatctctaccatgacaccctgaggaggaacttggatttcaaattagtgagcagtcggtacaatgtatttcactatgccatgttcaacagaaaggaatacgagcttgaaatacaaaaa

SEQ ID NO: 3612 - DNA, 371 bp, Homo sapiens
aatgaaaatggtcgaaggaatttcaagagtcagtgaagagtagaagcaaatgtgtttgctgttgagagtgaaggtgctgggtgaggaggagaagaggactaagaaatttccaacctcttgaaacactactagctaaaatctctttcatctgcctagaggagagtgtctctgcctgatgctatcctgagtgatgtctcagatcacacacgaccttggatacatcactttatgaaaatcgcattgtattttgtagtctaagtgttgtaaagagcagaaaacctgttatatacagtctttaccagttgacatgcgctttcaagtttactgattttcttctgcaaaccaagccattaaaggtatcttcctttttt

SEQ ID NO: 3613 - DNA, 196 bp, Homo sapiens
actaaccagaaccagatacagagaccagaagtatcacgtaggaagaacagaacaagaatctgttcattcaacattttgtcctggctttttctggatgctgaggattcagtgataacaaagaaaaatctatgtctccactggaacttatattattgtggaatacaagaaataaaaattttatgttttcaaaaaaaaa

SEQ ID NO: 3614 - DNA, 329 bp, Homo sapiens
gcccagctccctgtccttggcgcggatctcgtcgcgttgtttgcccaccacctccttcagcttcttcatcacctgtcgctcccgctctgacatgcctgggtgggcaagtgagaccggcagggccccacacatgacagatgcctgaggctggccagtgaacgggaactggttcttcttctgcactcccaaagggcaacgtactcctgccaagcccaggaaggataaactgctttacaccctggaccttatttcattctcatccccaaccactggaaatgggtcttattatcattactgttgtttctaacatcagtctcattttacatata

SEQ ID NO: 3615 - DNA, 184 bp, Homo sapiens
attgccgacagtttgaacgaataagactttctgctcaaaggatccccggccctggcatacagacattaaatatttactaaggaaatgaataagcagaagaaagaagagaagaaaggaaagaaggaaggaaatagatgtttatcttatttgaagttaataaaatattaaaaagcatgaaaaaaaa

SEQ ID NO: 3616 - DNA, 226 bp, Homo sapiens
  misc_feature 33, 36, 40, 51, 94, 138, 184: n = A,T,C or G
ttcctttatccaggggcagaagggtaccttgcncanaaanatgcaccgganggcaatttccaaggcttggcttggggactttctttccaaccanggtttggaagaatttgggaataattggtaaacctggtggaaganccagtgggcattttttttaaaatcctttaaaatggtaatttaagantcaataaaaaaccatggcatcaattcaatacccaaaaaaaaa

SEQ ID NO: 3617 - DNA, 511 bp, Homo sapiens
  misc_feature 382, 436, 443: n = A,T,C or G
gcgacgacggacgagaaacccccaaaaaatctgcgaacccgagattccttgacctgcagatataccagcctcttccaataagtctacatttaaactaaaacttctcctggttgagccagccataatggtggaattatgttaagcaagaactttatgccttcccaccaaattttcttcccaataaaaaaaactggttatcaaagggattggtcacccccccagacattaccagcactggcaggggaaaaagggagcccaagacagcccgttgggaagttgaccttctgggcccgcacgcctgggggtcaagtggagaactatggttgacttttatctggggtgccctttaagggagggccttcttgcttaaaaataacctaanggagccctaaaattaccccttacttgggaatggtgcatttaatgggattctttntaccaanggctgaaaataccccttgggcttttggccctttcatggaaccctaatttttaacctcccatggaaagc

SEQ ID NO: 3618 - DNA, 332 bp, Homo sapiens
  misc_feature 17, 18, 26, 41, 42, 48, 66, 76, 86, 112, 122, 128, 132, 137,146, 156, 167, 172, 182, 188, 202, 213, 245, 249, 254, 261,276, 291, 317: n = A,T,C or G
catttgaatcttgggcnngaacaaanatgttaacagattanngctacnattaattttgcccttttntgattggatnggggcaggcnaaaataaaacctccccccgggggggnggacttttanacattntcanccccnactgggaanggaaaacctnctcgaaggaanaaaanggtttacctngacccntgccccttcgattngaccccggacnccttggctaagcccttttcctttggccttggncaanaaaanccccccncccgggggagggatnataaaattaaaacantgggcccgaacccttgaactttccgnatttccccgtaaaaa

SEQ ID NO: 3619 - DNA, 142 bp, Homo sapiens
  misc_feature 21, 30, 38, 47, 48, 51, 54, 88, 102, 116, 125, 127: n = A,T,C or G
tgccttattataatcaaaccngctaaaaanatgcattncaatactanntgnganacaagcttttacagatgaatgagaccataatatncacttaaatttatnactaggcatgcaanaaaaacgtntntacctgtgtgtttta

SEQ ID NO: 3620 - DNA, 252 bp, Homo sapiens
  misc_feature 22, 29, 53, 73, 81: n = A,T,C or G
gactctggggacgacctggatnactcctncttaagacctgggctcattacctncattgccaaccttctggtgnctctcttntgctctcaagctttcatctgctgcctggaggatgcatggctgtcgtctccacctgagagggacccagggacagaggccagacacgcaggtggccaggttccagctcctcacctcagctctcagacttatgtctaccttttcccaactaaacccagggtcctccggcaccca

SEQ ID NO: 3621 - DNA, 201 bp, Homo sapiens
  misc_feature 26, 83, 113, 131, 137, 142, 160, 168, 169: n = A,T,C or G
ctgacctcgaagaatgcgagcttgcnccagactgatatatggcatcccttgattgggtgcatgatgagcccagctaccctggntctgagtgaagcaaataggacacatatgtnaccgcggagccttatgantttatntaccnaaaagactaatttggggnactggccnnaccctccctagacagaacctttttaaggaatt

SEQ ID NO: 3622 - DNA, 392 bp, Homo sapiens
  misc_feature 79, 338, 345, 351: n = A,T,C or G
tccccaggataacatacgtgtgacagaccaggattcagcccacagcctggagccaagacaccatccgacccaggatgancctgccgtggatcacctgagccactagtgacccagagatcctgagagtgaaaaacatgcatggtcctatacaccactgagttttgggatgacttgttacttagcactattatgacaattgctgactaatataccaggctcctggaagatttgttgtgaggttctcataaaatgatgaatgtgaaattgcattgtaagctgcttttaaaaaaggtacttagctggagtgaaagctctacaaaggcagaaattggttttgnttctggnacttanatgagttcctggaataaaataagtagctcaataaataccat

SEQ ID NO: 3623 - DNA, 204 bp, Homo sapiens
cctgcctaccacagagaatgccttggaatcagaggttccctgaagagaccctctcctcttagaataatccaaaaccagaatctccagagccccgtggtcaaaactaaaacgttccatctaggagtgagagagcacgatatctacttcctcacacttctcctcggttctcaaataaaagcgctcacttacatttgcaaaaaaaaa

SEQ ID NO: 3624 - DNA, 212 bp, Homo sapiens
  misc_feature 19, 21, 47, 73, 77, 81, 82, 83, 90, 102, 115, 123, 137, 140,151, 155, 168, 187: n = A,T,C or G
accagcccaacctgaaaantnctcgctgggcattacacatgttaaangagtgtaggagcatgtccggcacacngtgncccnnncgtgacntaagcgcactanggtccggtgtaanccgatctngcattgaccatgcnacnctatcctatcnacanatagattgttaanctatctgtgctgatcaccnaatatctttacttgcccacttgagg

SEQ ID NO: 3625 - DNA, 142 bp, Homo sapiens
  misc_feature 36, 37, 52, 61, 67, 71, 75, 80, 82, 90, 94, 104, 113, 121: n = A,T,C or G
ttacttgacgacttgaggctgatggtgcttatgcanngaaaccactgtggtnaatatgtancactgnttgntatnactgncngcgtgcantatnatattaaaanccggctaanaagagtcntaagagtactaaatgtgataa

SEQ ID NO: 3626 - DNA, 101 bp, Homo sapiens
  misc_feature 21, 30, 41, 49, 54, 55, 68, 79: n = A,T,C or G
ttactccttatattcaacatntattattgnatatcatattntgcttgancaccnntttctttaccttnaccacttctcncgctgcatggtgtcttattcct

SEQ ID NO: 3627 - DNA, 271 bp, Homo sapiens
  misc_feature 16, 22, 30, 34, 36, 53, 57, 59, 77, 78, 85, 90, 91, 113,116, 150, 179, 191, 196, 211, 213, 222, 238, 241, 255: n = A,T,C or G
gaggctgatggtgttnatgcanagaaaccnctgngntaaatatgtatcactgnttgntnttactgccagcgggccannataatangaaanncggctaaaaacgagtctttgantanaagtgtgataaaggactttacagctgaaaagacnatcatatacactttaaatatgatttaccnaggcattgcccnaaganaacgatatttgcacngnggggggggntatttattccttaaanccnccccccaccgggcnttttttacctttaacc

SEQ ID NO: 3628 - DNA, 265 bp, Homo sapiens
  misc_feature 20, 35, 46, 74, 103, 122, 127, 129, 134, 135, 149, 155, 157,174, 187, 191, 215, 221, 223, 231, 234, 249: n = A,T,C or G
gaaaactacctgaatgctgngagggaccgtcaaangatttgggatntatgaagcttacatccagaggattttcntgaaaaaaatatgcataacatatggtganatttttgaaaaattccatntcaanancgttnnaaatcttcaaaatnctcggntncagattaactgataccngttgttactgaantcgncggaccatgttttttatgacagcnggaagntnatgcctantcngaaatgtctgaccancttgtaattaaagtac

SEQ ID NO: 3629 - DNA, 108 bp, Homo sapiens
  misc_feature 16, 58, 59, 71, 78: n = A,T,C or G
cctggttaaatccaanctgaattggccaattcttttgctttttaccctgcaaaaaaannctcattaacctncctcttntatttaccccccaatctttcacaaaaaaaa

SEQ ID NO: 3630 - DNA, 340 bp, Homo sapiens
  misc_feature 321: n = A,T,C or G
gtcgagttctcccagaagcaaaatttgaggcgagggtttgggtgcaagtgtttgtgaaataaattcttccaggagaaaccaactggccaggaagtgaggacactcaacagcaggaggttcaagcgcaaccacagactcagcctgagcttgcagggagaccaggacagcaagtcacactgtgtggttagctgctcctggagtcaagagctcagtcctaggagggaagcaggagaacagccctcctggaggaggcgatcctctgacgaaggcccttcagcagcagagcacagggcggaaaatgcacaccgttgcaggctgaanctgagggcaggatgggtga

SEQ ID NO: 3631 - DNA, 241 bp, Homo sapiens
  misc_feature 92, 113, 137: n = A,T,C or G
gcaggcacaatgtcatcatatgcatctgattgtgcaaacttgctcgcgcggagcatacataagaagcctgccttatgcttcaatcaacttantcaggactttttgtaaggaanagctcaccagaggtggctcgattnttgtcttggctaaaggaggaagaggaaaatttcgaagatcttgggttctagctggacagggcccgaggtgaaagatgaaatgtcaaacctatattcctcccaaa

SEQ ID NO: 3632 - DNA, 406 bp, Homo sapiens
gctgctgtgagaaagacctagcacttacctgcgcctgggccactctgccaacagcagtgtgcgcacgaaatcacctgggattttgttacgaaggccaacttcggtccagtatgtctgggtgggcccaagattctgcattcccaacaaacttgcaacgcctcacaatgcgcatgctgcccgccctgtgagctgtgagagccctggaccggggattctccaccctggtggtacctggcaatcatgcagggaggtttgaaaccactgtgcccggttccacctgtcactaacctcatcagaaatcttgaggggcccgggaaaattcgcaggtgcagtcccttcccttgtccccgagcatgtttccctttaccattctgctgcttaagtgcaataaaacgcacacttccag

SEQ ID NO: 3633 - DNA, 382 bp, Homo sapiens
atggggcaaacaaagctcaagtgcgtaaatacttaccctggagtcaccaacatcagacgattaaaaaccaaaacctgaggacagctatttttgccttggctttcattctaactaccatacaagcacgtgctcaatgactatgcaagaagtgctttggcctcagagacatttggagagcaccgagaacaaacatctgtaatttagaacgtttccttggaacagatcatttgagcgttggggtcttcagaagcactagaagttcctttacagaaaccagggtgaaggcaggaactggaaagaggaggtggttaaaagaagctggagttctgagaagcctgtggatccttttcaatagaagaaaataagcagtttcaaaaaaaaa

SEQ ID NO: 3634 - DNA, 316 bp, Homo sapiens
  misc_feature 92, 93: n = A,T,C or G
attaactgtatcttgagagttggccaggagtaagaagagtgtttggaaggaagagaaggtggaaaatgaagaggcggcaagagactcaggcnntcagacaaacaaatcatccatcttcccggctgaggtcaggaatattcgaaaagccctgtgtcctgcacagcagccccacgcaggtttagtgcagcagatgctctctggctgagttagagaaacagacaaaaccctcatttctctctgagcactaagtacagaagatgaggctgcgtcagtctcattaggaataatagacagaaattgcttacaatcaaaaaaa

SEQ ID NO: 3635 - DNA, 177 bp, Homo sapiens
tttgttccatctgaaaacagcggaatatacacctgtcagctgaggaatgtttaggatgttccatataccgtgcttggttcccagttgtcccgggctgggttagagcctggttctgtgtatttgtgcttcaagtactttattgcttgcataataaacattccaaaacccaaaaaaaaa

SEQ ID NO: 3636 - DNA, 475 bp, Homo sapiens
acctggtgagctaccagctgaagtgacagatagtttgggagtactatattgaggtcaaaattgcccgaacaatttgcaagaaaatttcagaagatgaagactgtgcatttcaagaggatcccaaaatgcaaaaggtggttttttgtacttttattgttgcatctaaaccatggaaatttgaactcaccatgctgaagaaacaatgcaaagatatgtagttatcttctagtgtgttctgccacactcatttccattttaaagaagaagcaaagacacttgcaagaactagaacaacacagttaacccattaacttcatttgtttggcctttttgcatttttgtgtgttcttcatgggctgatgttgaaaatccatgatgtggtttgacagcattgcatagcctattcttgctggatacttcccctactagctgggataatctgctgcaataaatggaagtggtttctacacctcaa

SEQ ID NO: 3637 - DNA, 108 bp, Homo sapiens
  misc_feature 26, 30, 39, 47, 52, 55, 58: n = A,T,C or G
gccaccatgaccaccagacaggtaantgancctccttcnacggaggntatcnccntantttaaaccaccccatggctatgcatggggcaaaggacgaaccaccactgg

SEQ ID NO: 3638 - DNA, 310 bp, Homo sapiens
aacattgactctcgtggcagcagggggaattgattggagtaagaagagctgtgagccagagaatgaattcctgaaccagcccaagaagttccagtgacagatgggagaggacaccttcatacagcagtaaatttttggccattctccttcctcctgtgttgctgggtgggtcagcacaatgagtggtaggagtacttctggaagtcattcctacagcagggatgctagcaattatgaaaccattcctagaagtgtctgaaaaccacaacatattccaataaaccaaaaatgaagtatttccaaaaaaaaa

SEQ ID NO: 3639 - DNA, 456 bp, Homo sapiens
gcagaactgttgatgaggcattatagaagctcatcagtggaaccacgttcaaaaagaagcattggacttacataaaagctttagaagagatccagaaagcacaagagaggagacagacaacggagagaagccgcacaggagaggcagcgcgaaagaagccttctaatctgtcttcaacatcctgctttgcatggtggtctctaggcggcaattcccaagagttcaggtgaggactccaggaaatgccatcggggaggatgccagctggcctgcggaacttcccagaaaggaaaagccaggatttaataaagcccagctctgagctcatcattgcttccagcttgctcaggagcagacagcaacctcagtcacgagacaatttatggcccagctgggaaagagagaaatgctgtggggaaattcttttttgggtgacaatgggcaaagcgattgaaa

SEQ ID NO: 3640 - DNA, 458 bp, Homo sapiens
  misc_feature 365, 402: n = A,T,C or G
gatggccaaatgcatcaaaattaagcagctgtgggtgctgtatttatggaggaatttttggacacaatcaaccttcagagatgactggaggaagaacatagcataaatatggtgaaggatgcggctatacgggtccttggtctgtatattagaagagcactttacaagcacttttacatacttttctgtcaaccaagtcagtaagcaggacaaatagcaccacctggatacaaagactgaagaatggagctgaggactagtgtgacctgaccacagggcattgaactcaactctcccaagaatttcctaagtctctcctcctccccctgtgctagggttgggggtgaaacttgagccccttgganacaaaatatttgagcacttgaatgaatgcattctttntgaaattcagccatagtcaccatcctgttccttaagcacctggtatttacggtggc

SEQ ID NO: 3641 - DNA, 541 bp, Homo sapiens
ctggcaaaaggactacagtttgccaacccgtgacctagagggcatatttcccaccaagttttgaaggatgcatttccagtaagttccaccagagcaacaccagtgactgctctgctactgagtcatggccatattccttccaataagaattttacaaagtccctgattcagtgactgaactggccctctggaagaatgcctgaagacaataagcaggttagagcataggttcctccatctcttgcttgaatcactgcattttaaaataagttcaatgatcctagcccttgcttcttcctgtacataaccagatctgtaatctgtaaccagatgtactctgacacctgaactttgatgattttgttctaaagtaatttctgagcatgtttgatgtaacattggagcacatgcggaacctccaccacctgatatataagccgtgggctgatacattgctttggagcaagtcaaacagaagctctctgaaagactcttctggttccaatcctcagtaagactatgaataaaactggattttaat

SEQ ID NO: 3642 - DNA, 406 bp, Homo sapiens
  misc_feature 324: n = A,T,C or G
gagccagaatggaaaacaaagacaggctgggaagctgactgtgagacagtaagacgcagacacgtaatgcagctgagtaggattaattagtgaagaactggagtgaagatccagtatctgctgctgaggtctccagaactgacttgaacctacaatcaccatctggctatactttcagtgaaaacttgtcattctggctcttgtctgagacttctttgagacccctcttataatatgtaacacttaatgaatccttactatgtatcaggtgttgtgctttataaacattacttcatttaactttcataataacccaaatgaganagggacctcattatcttcatttttataaatgaggaaacggaggcttagagatgttaagtaacggccaggcactgtggctgac

SEQ ID NO: 3643 - DNA, 176 bp, Homo sapiens
  misc_feature 31, 37, 51, 63, 88, 132, 137, 142, 143, 153, 159: n = A,T,C or G
tgcgaggatgccatgcctggagagggcctgnaaaccntgcccactctcccntgccttgccctntgactttttgcatctgcatcattgncggcactcctttatatctataccagtattagatgatggtatctngaagnccctnnccagacgctngagccntgctcttggacttccca

SEQ ID NO: 3644 - DNA, 265 bp, Homo sapiens
  misc_feature 18, 178, 193, 207, 215: n = A,T,C or G
gagtggggcaggttcttnggtggcttaagaacttccttaaaagcaaagccctccaacctgggagttaagccatcaaggctttccacctacccagctggcttcaagtcaccatcaagaagtccatggtctggaataatcaccaccactgggctgggatttggttctggaatattctctnaatctaacctcattncccaccccatcttncattcttnccaaattatttccaaaatggtcccttttggcaattcataagttcatcatc

SEQ ID NO: 3645 - DNA, 161 bp, Homo sapiens
  misc_feature 25, 37, 43, 60, 69, 71, 89, 107, 114, 115, 119, 129: n = A,T,C or G
ttggcggggccccatttttttgacnccggggaaaagnggtttncccaagcccccccggtnccacaaaanancccttggggccttttttntttttttaaaaacctccncccttgnngggntttgtttggnccaaccccccccccccccccttggaaaattgg

SEQ ID NO: 3646 - DNA, 310 bp, Homo sapiens
  misc_feature 42, 46, 102, 118, 144, 147, 149, 160, 162, 165, 169, 173,178, 195, 204, 205, 220, 243, 251: n = A,T,C or G
gcagtcctaatctgaacaagaaaatgcgtcacccatcaatcncccncttcaaaaagaagcattggacttacattaaaagctttagaagagatccagaaagcnccagaagaaggagacnggccaccggagagaaagccgcccagnganangcaccgcggananagncctngtantgctngttgcatcttcagggtntgaatgggnnccacttactccggcnattcccaaaaagcttcaagtgangactccangaaatgccatcggggaggatgccagcttggcctgcggaacttcccataaaggaaaagcc

SEQ ID NO: 3647 - DNA, 201 bp, Homo sapiens
  misc_feature 31, 46, 55, 91, 99, 102, 114, 115, 117, 128, 134, 155, 169: n = A,T,C or G
cctgctgagcccctactcctattccaccccnaagacctggagtcancaggacggnggagagtaagcatgatttggagaaggaaggccatgncctgatanagngagaaggcgacnntntgcaaaccaanaaaagnggcctgaccagaaaccaaacnggctggcaccttgntctgggacttctccagaactgtgagaaataaa

SEQ ID NO: 3648 - DNA, 249 bp, Homo sapiens
agatataagacctaagggaaaggcctaggctagaccagcaaccaactgaagcatcctgaggaaataatttgttttatcttcggaataaatgaacgatgctcttcggaaccttccccatccctgaacttgctaccgctcaaataatggtatcttgtaaataatgctcttctgaatttgcacaaaaagcaaaggtatatgaggaactatgagggaacaaatgaaggccataaagacttgttcaaaaaaaaa

SEQ ID NO: 3649 - DNA, 459 bp, Homo sapiens
  misc_feature 369, 388, 390, 399, 422, 435, 443: n = A,T,C or G
gactgggcccactggccttcccactgtcattcaccaccaccagccctttgagagcctgccattctggaaccttcttttccagccacagtcttaagatgatgagcaacctctgcagaaagaatgtaaagttacaacacgcacacagatcccatcaagatgagagtgagtggagatgatgccctatttccgagcagctcagagtgcatgtgtgccagacacgagcggactgccggagatagctgacacagatccgaggacacagaaggaggctctttaaaaagccagagcaacagctagcatgtgagaggtctgattaatccaccaagggcttatctatgcatcaacaaacagcgatggtctgtgtcttgntccctggatactttctggntnatgccaganacttgggtttaatttggttgaangagcgataaatcnttgaatcntaaaactcattggctt

SEQ ID NO: 3650 - DNA, 134 bp, Homo sapiens
  misc_feature 32, 35, 36, 44, 75, 77, 106, 111: n = A,T,C or G
caacaatgaaactaggaacgtaacccaagcgntcnngccagagngtgtatgctcgatcttgggaccacaccactngncctttgtggggttcttcgggggtcacacnctttnagaattgaagccatgtaccctct

SEQ ID NO: 3651 - DNA, 293 bp, Homo sapiens
  misc_feature 76, 83, 93, 96, 99, 104, 105, 108, 110, 116, 119, 123, 134,136, 143, 147, 150, 153, 164, 206, 221, 228, 229, 237, 248,267, 272: n = A,T,C or G
atcactcactctttctgaggaaaagatctttctggggaaagctagcttccatgtcatgaaaacattcaagcttccncatgaanaggcccacanggncangaacnnctncntgaggncantatnccccttggccnanccggcancaanccnaantttccagcccntcactctgcacaattgctcttaaagccccaggccagaacttnttgggagacagattntgagggnntacttccnctttcttgctnggtggcctgtgtaaattanactcnttctttgatgctaaaaaaaaa

SEQ ID NO: 3652 - DNA, 468 bp, Homo sapiens
  misc_feature 381, 389, 398, 434: n = A,T,C or G
gtgaactgggagtaccgcacacagcatggcttccagcctgaagtgactgtaaaatgccagtgaatagagaggctcaaggctgagtaaaggatcctgcacactcaacaggctcatccttctctgcacccgagttgttcatagagtcccagttacagagctttcagaaggcggaattcgtccacagcacactattgatgcctatcgaatctaaggaaattaactaagaagggaagaaataatcttcatagaaaagggatttgagaacccagaagagggtatgggcctggcagtgtgcatgctgcaaactatgcaccatcactggcctaaaacgcacctctgtgtgcatcatttacttacgtttaaaaatcaccctctacttgntctcctgngaccctcantggactatattcagacagcactggaagtgatagccngaaaaagtagaaaccacccatgtggtcattccct

SEQ ID NO: 3653 - DNA, 133 bp, Homo sapiens
  misc_feature 17, 31, 54, 59, 61, 65, 77, 80, 85, 87: n = A,T,C or G
gataactgagaaaaaanatttacagcgaagncacgataaattcacttaatgatnacgangntccngaaagaggtatnccncccgngngatttttattacttaacccccccccgggtggtttggcctttacccg

SEQ ID NO: 3654 - DNA, 473 bp, Homo sapiens
  misc_feature 297, 401, 404, 411: n = A,T,C or G
ctctcatccccagtgtggttgtgatgctacagacagaagaggataagaagccacagaaaacaggctggaggagaagtgcggattcagcacataagttgtcacttcgccagaatcgatgagaatcaggagtccctgaatcgcctggggatgctggtgaaagcgacaccatgcgggaacaggtgaatgaagcttacctgggtcaacgtgctgcatggacgtcatttctgccctcccacctggggaaccagcctccaaaatattagcaacttgaggcaaggccagggcccatgctggggnaggagtcaccttcccagtctccctacccagaatctccctccagacatcttcttcccctgtagcagctatcaacttgttgcctgctaacatgttaatggagaagnaanggttaanaatgtgccttttcccagggaactatgttttaaatcatcaaagacatagggattaaataattg

SEQ ID NO: 3655 - DNA, 332 bp, Homo sapiens
  misc_feature 36, 48, 89, 97, 102, 112, 116, 117, 131, 138, 144, 146, 152,169, 171, 214, 233, 248, 251, 253, 264, 267, 279, 285, 299,301: n = A,T,C or G
acttgacgacttgaggctgatggtgtttatgcaaanaaaccactgtgncaatatgtgtcactgtttgatattactgccagcgtgccaanataatagncaaancggttaatangtgnntttgagataagtgngaaaaangctttncngcgaanagaccgataaatacacnanaatgattaccaggatacggaaagaggtatggcacatgcgtatntatttactttacctccccnccgggctgtttttcnttnanccgagaaaaanggnttccctggaatncggggncctttggtatcccntnatggccccccttggtaaacctttcttctttc

SEQ ID NO: 3656 - DNA, 481 bp, Homo sapiens
  misc_feature 232, 415, 422, 438, 451, 454, 464: n = A,T,C or G
gccataccccaccttatgttttctccatctggacacgtgtgctgagaagacctttggcagggggtctatgtccccactcctcagatcttggtggggttctgcaactactttgactgagacatcaggcagaagtgatgctgtgcctgttttctggcccaggactcagtaacactggcccgttcccacttcctgtctcctggcatacatgcatgggttcctgaggtgccacgtngagaagttcaactatgcttctggagacaccacgtgggggagggcaagtatcgcaagctgccatctcccagccatacctgccttctagagggaagcttctagaactcatcacaccagcccagttgcctgcctaatacccgagtgaactctcaggatgctacagacagcaaaatgggccaactgnttcctgnccaagtctggatcccntggatcaagagcncantaaaagtctngggaagccaaaaaaaaa

SEQ ID NO: 3657 - DNA, 315 bp, Homo sapiens
  misc_feature 85, 88, 90, 94, 102, 106, 109, 117, 119, 125, 131, 176, 275: n = A,T,C or G
gaacaaaacatccaccctagcgagctgctcctgcaaaaacggggacacctcttgccactgaaagtctcttgcgtgtcgatgggantancnttgnggattaanttanttnggcaaaantncttggnactacnccaggcgtggttttaggtgctgccgacactgggatgaaacagccngggatccctgcccctgtggaacttgcattccagcaatgggagacagaccatgagtggtgtctcatatgcattcgaagacaaataaagcagggaaaaagnggagacagaaacctaggtgaccagttatgaaagcaaaaaa

SEQ ID NO: 3658 - DNA, 358 bp, Homo sapiens
gtgactcggggatagctgccctgatgccaaggcgattgtcttctggaagcagccacgccgtgtgaggttcctcatcactgccctgcatctccctgcgagctctcggggataattgcaaaatcacgtttgattccaggggagcagaaagcagcaggagccgtgaattctccaactcttaactggtcctcgactggagccacttttccctgcccacccatccctgtggcggattcattacagttatccaaagccggttttaactttgctccccctggctcagaagtcctgcaagtgggtcctgagcggcttcaccaattcaagtttattcctatcagcctggaatacaatgctctacctg

SEQ ID NO: 3659 - DNA, 226 bp, Homo sapiens
ttaaaacatttctcaacagagacgaaaaagagaaattgagtcagtccaactgcttagtctcgactgggttttacctgcttgattgtctgaagacaagaatacaccctgatccagcaatgagtatggtcaactgcgcagccacgaataaacgtttcccatacaagacttacacatcacggcaaggtcagtcttaactctagttgggaaattaaatgttaaaaaaaaa

SEQ ID NO: 3660 - DNA, 434 bp, Homo sapiens
  misc_feature 33, 34, 38, 40, 45, 50, 66, 97, 118, 211, 223, 237, 246,247, 251, 253, 269, 273, 279, 283, 288, 313, 340, 367, 369,393, 410, 414: n = A,T,C or G
ctcgtgatgaggaatagcaaggagagaattganntccngntcaantgccntccccctctcttcccngatgtggaaactgaagcttaaagagttccanggtcatgccctcggagacggnttcctcctgctgcacctgccccgagggaccccagacgcctcctctgtggcctatagcaccatggcgccctgagcacagaaaacaaacacaatnagaagctccganaagcacgaggccanggagcctgnngcgncncagggaagactgggcngaanggaganaagncaaanaggtctgggacagcctatgaggggncagcaacaaacacccacagtggaaggnaacaaacaagccccgggggcccccaantntcgacccaagggattgggactcanctcctttaaagagttantttnaattatgcaaaactatcatt

SEQ ID NO: 3661 - DNA, 495 bp, Homo sapiens
  misc_feature 388, 390, 401, 413, 417, 419, 425, 453, 470, 479: n = A,T,C or G
tttggaaaaacagaacttaggggaccaagagaggaggtacaggacttggaaaggacaatgagcccagcaacaccgcagccaggagcaacgaggagccactggcctgagaccctgctaaggctgttcctgtccactgagcacagaacaggctccgtgtggtaacgcctcaggaagctgcagctctgggacaatgtgtttcctctgtgaataccctcatgtcccgaccaggagaattaactggttcttactgcttctcttcccactgagtctcaaaatcactgtcatgcactcaaccaatattaattgctcatgagtgctttgggctgcaccaggccatggctggactgaacctctgcgagtctgcccatcataccatgagtgggctctntnacttacaaacnggggggcagcancctngnccccanggaggttaccattacccttaaaaattgnttttgggacccaggccnaaatgaacncctttaaagccaaaaa

SEQ ID NO: 3662 - DNA, 254 bp, Homo sapiens
tgtccaagctggcccgcttgaaggatggtaggccatgcagaagaaaaccaaggcacccagaaggacatcctgccaactgcgagatgtttgagtgagaccattctgtcagccagtcaccagccagccaaccagctaatgacagatgcatgcataggctccagagagatcagctgagttgtcccagactacaagaaccagccaacccgcagaattacaagaacaataaaaggttgttttcttaagccaaaaaaaaa

SEQ ID NO: 3663 - DNA, 262 bp, Homo sapiens
agacttctttcaggcatttggcaagactttatagactgtggaatcagaggactgccattgaacgtctaatacattggagaaagaaggctgaggataactgatcaccagttaaagaattcaacaccttggaaaagacactaggagacagatctacactgttataatgcttttggaagcttggaaaaagtggtagccaacatcaagtgaagtaactgagcaagaactgttccggaagatggtggaggaaggaataaaaggctca

SEQ ID NO: 3664 - DNA, 114 bp, Homo sapiens
tcagtcaacgaacattcgagatcctgtcatgtgtcagacactgtgcggagagctggagataaaactgtcaacaagatgaatgcagcctctaaaataaagagtttctaatccaaa

SEQ ID NO: 3665 - DNA, 203 bp, Homo sapiens
ctctgctgctgcttccatgcatgtgcactggagctgttccccatcagcctgggatgaccttccccatcctcagccattcacctacgagctgctgcccttgaagcatccagccttggctcctgctcagtcttctcagctttcagttacacaagaagcacccttaattttgtaaacgcctgtcgttgtgttgttgcaaaaaaaaa

SEQ ID NO: 3666 - DNA, 189 bp, Homo sapiens
cactttgcgatgtggctctgaaagacccctgccctgcatgtctcttcatcctctgtggacccagcagccactccctttgttcctcccagaggcgactatgtggccactaagtaggtcctggaaagtcctatttcggctaattttaatgagtgatataataataaaatgtagcaataaactgagttttca

SEQ ID NO: 3667 - DNA, 325 bp, Homo sapiens
  misc_feature 202: n = A,T,C or G
atctcctccctacctttctccaccctgttcttgccccatgaagctgacctctgaggactggacaaacaggctcttttgccctcttggcaagagataagaggattaaaggaagagattaggctatttgtttccctctactttcctgcctagtttccatggactggtggcatctttctaccaaaggctatagctcctggcagancccttttccacacaactcccctctccagattcccagtcccactctccccttccccttttcagcctaggagaaataacgatcccttgttggcttcctacactctgcccacacctaaataaaaaa

SEQ ID NO: 3668 - DNA, 398 bp, Homo sapiens
ttttggctgtcatctgaaacagaaaatcagttcaacaccactgcagttaatatcgactaaacagctccgaacctcaattggccaacgttttaatcatatggagacaatttgaattttactgccatcaagaaacaacaggaatatttaatgcaagaattaggaatgcatactggttttcacggtgcagcttggtaattatgaaagcacactttcttgttgtcgttaaagggacttttggtagccaaactattgttctggtgtgtggtgagtcaaaagaccccaatggcctctctgcctttgatcttttaaatgtctgaagttgtgggattttgcatgctacactgataatctgggaaaatgtcaatcactataaaaggaaatttttctattaaaaaaaa

SEQ ID NO: 3669 - DNA, 352 bp, Homo sapiens
  misc_feature 232, 240, 247, 252, 297, 302: n = A,T,C or G
aaagaaccctccggtgtccagaggatggtttaccaaaaatcttgctcatttaagttttgcatgtgatggaaaacctataatccaatggcaaatagtccagatttaataaagaaagaaagtaccactggaaatggtacatcaaatggcctgaagagaggattgcctggaaagagtcaagtcatccagaaaagtactgggtatgccagtatggttcctgaacttaatagaaatncaagaagncatgggntctantaagaacttctgggggaatgggtcgggggtggtgggccatgtaancaaanagtaaaagggctgtaattaaaggataattttttgggtctggaaaaaaaaa

SEQ ID NO: 3670 - DNA, 443 bp, Homo sapiens
  misc_feature 92, 400, 412, 417: n = A,T,C or G
ttctagaggacaagcgtgggacctgccctggaaaggcagtaataatcgtgtggcaccaggttgaacggaaagcagtgaatccactccaacgngctctttacatcatcactcctccgctttccaccttctcaagcagctccaggaggcctctaaagaggccttgaaggacaagttcttcacctcttgagcagaggaggaccttccagtgaaattaccagtgctatgaggggatacaccaaagaacaggagaaaagagatgcgatagttctctaccgttctgtaaggacctgagagggaaagccatgtttttcctcctttgcctctgtagtatatggcacaagtgcagaatatgacttgctagatatcacactgtgtgctccataaatgtgggtattggacnagaataataatnccatnctttccttagaaaatatgaaaaaaaa

SEQ ID NO: 3671 - DNA, 422 bp, Homo sapiens
  misc_feature 17, 32, 40, 121, 133, 142, 143, 152, 157, 158, 170, 173,177, 179, 185, 191, 199, 203, 208, 213, 224, 227, 230, 238,247, 251, 298, 299, 301, 312, 314, 321, 331, 361, 386, 394,403: n = A,T,C or G
gtgtctcacatgctggntctgacagtcgtttncatgatanaaggaatgcctggacgaaggaagcttttcccccttggagacatctaagcctgtcttgagggcccgaggcatttggctcacntccctctcccantatgcatgnngcccaccanggacnncaaaatctgagnggnggcnangctgcntgccangcccctgncacnacccnttttnatccacccagncanggntgaccagncgttgattngccnagccgttttggtctacaggcgaggaacacacccatgagcttcattanngnaaaggcttcgntntctattnaagcctgggncctggcacattggttggaccagagctggcncaagaaatatttgtgcaatgaattntttttttnaattaacgnaagggtatgcaaaaaaaaa

SEQ ID NO: 3672 - DNA, 411 bp, Homo sapiens
gactctcttatctccaggacaactccctcaactagctcaaacaaggagagttgtttactaaaaaataccatcgacaatcccttagacatccagtgcagaaaagtaaatactgtaggaccacctgggaaatacagctaagaagccaggaatcaagactattcccaccagctctcatcacctgattctttgtagtgtctactgcaaatttatacaatattttttcaaaatctgggggcttcggtttctataagaccaatgtctgtctatttccaatgtctgaatcaccctctgataggtgtcttattagagaatttatcatatatttgttgatatggaataaagataactctttaatttgatttcctcaactactactaaaaataaaaactaaattctgacttgaaaaaaaaa

SEQ ID NO: 3673 - DNA, 563 bp, Homo sapiens
  misc_feature 354, 416, 493, 512, 536: n = A,T,C or G
gtattcttttctccatttagagtaacatccttcagaactccagtgtcttatctttgtgtcatccagagcgccacgtagagtgactgtgaagtcaacagttgggttggcatcgctatttccactgacttgctaaatattctgtagcatgaagtagagagtttctttgcagatcttctatgctggtgcgggatgctctacattcttcaccaggtgcgggcagtgggcaggccaccatgtgctctaagcacccagcataactgagccagccctgctgctgaagggaatcccaggagacaaaaatcacctgctttggttgctggcaccttcatcacccaggaattttacaggtagtgngctaactgctccgaagcttatcatcatctttacagtccctaccactttacagatgcgggaanggaaataccaacctcagaccccccgcagggcaagggagggcgtcttttcttgactggccggcaaaagggccaacttnagcttttgcaactggctgnctctggggttcctgggcttcctgngggggggaaaacccctttcattccatg

SEQ ID NO: 3674 - DNA, 217 bp, Homo sapiens
  misc_feature 131, 154, 201: n = A,T,C or G
gtctcccaagggccagtgagaactctggaaactacagatcaccatgatcctgcagcagtccaagtaatatttaaggagcacctactgtgtaccttgcagtgagagagaactgttcattcgggaaaattgcnaacaactaaatacccctcaccangagctggcccattatagcaactctgaacctctctaccgcaggctctnaaaatggggaaagaaa

SEQ ID NO: 3675 - DNA, 432 bp, Homo sapiens
  misc_feature 349: n = A,T,C or G
atccccttttatttttcaggaattgtggcttgcattgtaagaggagcctgtgaattcagaggcaagtctgctgaggaccgaatgttcctgtccataaaaacagaagtctggcctgggctcctctcttgggtgaatttgcaatgccagatcctctctatcagtttggttttgtttcttgtatctctgggaaggcaggcagacagcacggtcacctgtgaatgcagctacaattggcttagctgcctcactgataaatgtgcccccagtaagctacaaagggattaccagcgttctcagcagctaaaggaactggtgaagatttccccagccaaaagtaaaaacctcaagngttcatagatgaagactggggagattgcaaaagacccatccagcagtggttctcagacctcagtgtgcatcagaatcacccca

SEQ ID NO: 3676 - DNA, 563 bp, Homo sapiens
  misc_feature 526: n = A,T,C or G
gctgcttgaagcaatttaatatggttcgatcccacagaggatgcataccgacagaaactcaacaagtgagagctggcttgctgagggcaccacagcacccccgccttgtagacagcctgctgcccagggctgtggcgggtctgccagaaccaggggttttcttctcatctccctcagggagcagggagctctcccgtgtgataatgagcagcagtcgcagtggcggcgttcttcacagagacctggccagggcacctcttggaaaccaacccccggcgggatcaaagagggtcaaacttcaagaggatgactccaggttcacggttgaagcgggtctttgttcaaactattccacacctgaaaagaggaccctagagcaagaagcgctgtggaatagtgtaagaatttggagtcaggagtcctgggtgcaaagtcttgattttgccactgtgttgcctgtgcaactcactccactaaacctcagtccttatgggtaaaatgaaaataatattatctactgcagaangttggttggatgtccagataacaatgtagtaaaggaa

SEQ ID NO: 3677 - DNA, 569 bp, Homo sapiens
  misc_feature 464, 487, 499, 527, 541, 548: n = A,T,C or G
ataagaaaattgagactcagagcatttaagcagccagcctggactcacagagatttaagtctcagagccagcactcaggatgagtgccaatggaagcctgtccttggagtccagaatgaacgtcagaagcaacccagccacagcaggagactgtccatgaatgtcatctggctgaatctaaagattagctcgtcagggaatcacttttccattctgaacttgcttctgaaccatcatgggtcacattttcccatatggaaccagcgtgaaagaagaaagagccagaatcaagtgcagagttgaacggtgtggtaaagctgacatttggaaaatggatctagcttcagcacttggctctagagacacagctacataggccaaacaccaagtccaaggaagcaccctactcatagtccctgcttcagcacaggttggcaccgacacttccaattaggcagagcttncagccaggaatgagactgactgntggtgctaatgngggaactctattccaagaaagcagactnccaaacctggcggnagagctncagacctttttctggcaaaag

SEQ ID NO: 3678 - DNA, 165 bp, Homo sapiens
  misc_feature 24, 27, 41, 42, 45, 52, 58, 59, 79, 80, 97, 99, 111, 115,139: n = A,T,C or G
acatagggaaaaacctctgcaggnatntggttgactgtggnnctnggctctnttttgnncaccccgcacatgattgttnntggggtgtggcttgaangnaaattgggacanctgngcccagggggggcagctcccattnctgcttgtatggcacttgaaagtgct

SEQ ID NO: 3679 - DNA, 157 bp, Homo sapiens
  misc_feature 17, 44, 49, 51, 55, 70, 92, 100: n = A,T,C or G
acccttgttgtagacanagtttacaagccctgggtttaaggtcncaagncntganatttgggccaattcnttttgctttttaccctggaagnaaatactnataagccacctctgttatttacccccaatctttcacaaggaaaaactgtaattttac

SEQ ID NO: 3680 - DNA, 266 bp, Homo sapiens
  misc_feature 33, 34, 45, 46, 52, 55, 56, 58, 64, 66, 69, 74, 82, 94, 95,113, 188, 192, 211, 248: n = A,T,C or G
ggaacatctaacggcctttgatgatgaatacanngcttttagtgnnccaatnagnntntcttangntangggtncctcccanttttttacgagnnggaatacatgggtatcancctctttggagcacgttcagcctgggttaaggtccacagctgaatgtgggccaattcttttgcgtttttaccctngggnaaaaggaaaattactcatnaaagcccacctctggtttatttttacccccccaaatncttcaacaaaggaaaaaa

SEQ ID NO: 3681 - DNA, 205 bp, Homo sapiens
  misc_feature 21, 33, 34, 39, 52, 72, 78, 79, 94, 112, 115, 130, 135, 156,170, 173: n = A,T,C or G
aggatcctgctgcttgggatnacaagcatgggnnttatnaagagaaatgggntttaaacaccattttctttnatgggnnaccttttgtggatgnttcccagaaagaaattanacncctttttttattccntgggncttccaccaagggggggggcnggggggggggcccnatnttaaaaaattgggaaagttcttcaaaaaaaaa

SEQ ID NO: 3682 - DNA, 332 bp, Homo sapiens
  misc_feature 17, 28, 29, 54, 58, 64, 65, 66, 73, 75, 76, 90, 105, 182,198, 203, 205, 208, 209, 210, 213, 215, 217, 222, 231, 251,255, 257, 275, 278, 283, 285, 304: n = A,T,C or G
gctttgaacgatcaggnccagatggagnngcttctactgaatctcgagcttctnaagnggagannnactggancnncccttttgagcttnccctccacttcttgnctgccatatatgacattagggccctcgactcgagccatttaaaaatggggcggcgccatttaaaatggggcccgccngtccaataaactccanaatgntntcnnnacncncnggganagaaaaatnacctcaataaaagcccaccntctngnttattttaacccccccanttntttanantgaacaaggttttcaggcncttatccttaaccacccccttgggcctt

SEQ ID NO: 3683 - DNA, 408 bp, Homo sapiens
  misc_feature 369: n = A,T,C or G
gtggggtctttcattccgaagttcctccccatccctgctgggattctgctctcaacaccggcttcttgtggcacaggcaccaccacctcctgcctcccgtttgccttctctgagacaccgcctagaaaatctccagaaatggacctccccagaacctgtcctgatatataggagatgagtcaagaatgaagaagggtccacctctccagacccgctcctcagtccgggccagggcttgaaatcccacacatttccctttcaaggcaaacaggcttacagctttgagcctcctgaacctttaagttctcttgggggtaaagggggggggtcttacttgaaaaggtcatcaaacagaaaggcgggaaacgngggaagtttgttagatatggggaacgatgagcatcgggt

SEQ ID NO: 3684 - DNA, 413 bp, Homo sapiens
  misc_feature 20, 333, 353, 362, 363, 371, 377: n = A,T,C or G
gtctactgagggtaagacangcaagctctgctccacgtatcttcattccaggaacccagaatgaaggagtggcccttaatggaacactgctggtatcactgcaaagggaaaagagaaatggaaccacctaacagctcttaaagtttctggtcataaaagccaaataaatttttcattaacattttattggctaaaagaagtcacgtagctgagcctgatgatcaggacagggaagtatgagcctcacactgggaggggcaccaaatatgtggggacaataatctgggattcatagtgtgtgtgcacagaaaacttttgcatgtaattttgagnaatcttatttaacctttttncatattggnntttgcatntaggcncattttccctctcagataaaggaataaagatactat

SEQ ID NO: 3685 - DNA, 547 bp, Homo sapiens
  misc_feature 514: n = A,T,C or G
acagctgaaggagaagccctctctctccacttacagcagagatgcctgtggcccggcagcaccaggcggggacagggacgtcttgcatgggtgtgaagtgtgagacggactccactagaaccctcagcacctcccagagatacagggtttaacacacaacagatccctcttgacaaactcaccatgagaggagacgtcagccggcaggtgcctgtgggcttgagttctaatcacgctctgccactatccaagcctttcaaaccccctgcatcccccctcctcgcctcactgggctgtcatatggctaaaaggactcagggcctggcatacaagaggggcctctaaatcagctgaaaaactgcatcccatactggtgcatccctggatctgccagccctcaaggagactccataatcagttgctggggattctgaagttctcagggcaacagctgctgggcctaatcacgtaaaaatggtttcaatttctctggttgaaataacaatgacatggnttgggctctgtgtccccacccaaatctcatctc

SEQ ID NO: 3686 - DNA, 549 bp, Homo sapiens
  misc_feature 110, 120, 130, 132, 141, 143, 148, 149, 156, 173, 177, 202,204, 206, 207, 214, 241, 343, 496: n = A,T,C or G
cctgcaagcagcggctggtgcccagcgtgcaaatgtatcactaccagcaccagagtttaacagatactacagctggagctgcagaaagagcctcctgaggagctggactntgcagatganaatgaaagcngngactttatngngtacnnggggccnagcgtggcccccaacangganaagggggggggcaaccctttttttngncnntttttgnttgcaagggcttttgttgggccaacgncccactgccccattgaagtggacccccaaggttgaaggacaccaccttgctccatgagtgggggagaggcagggcccacgcttctcattacaaaaatatgtnctgacacttctgagtacctgtggctggctggagaggcattggccctgggatctcttgccagggagacaacccccctgcaactttgtgctaggtaatcttctgtcccctcttgggtctcttctttccagtctggaccttcaaattggagggggngaggagaaccctaaaagcccaggcatcgatgggggaattctggagacaaaagc

SEQ ID NO: 3687 - DNA, 486 bp, Homo sapiens
  misc_feature 49: n = A,T,C or G
ggaaaagaggaagaggccattgttgccagttgcagatgagcaatcctgnactcagactgaaattccagtccccagatttctaccccactcctggctcacacagatcaactgccattggaagcattgcagccatttgtaagtctactcaagaccactccagtggagacctgttccaaagcctggtttttaattacagcacctacaacacagactgagaaaaacaagaggaagaaaaccagttcctgtcatctcaaagtgcctgctatttttcttagaagattcaattccactacgccctgcttttagaaaactccatgtgtgaaattcataaataggctaggaagtatatatttacatcaccagaaaaaattcattatataagaatattcactttacaaatgattagccataggtttattctaaggaatgaacaacccttctagtattcaaaatatgtctttcaaatcaagctctatgatcaaatga

SEQ ID NO: 3688 - DNA, 572 bp, Homo sapiens
  misc_feature 18, 74, 101, 102, 108, 110, 115, 116, 119, 124, 128, 138,140, 141, 149, 156, 158, 162, 165, 171, 172, 178, 182, 189,194, 197, 203, 211, 222, 226, 237, 270, 308, 321, 326, 340,343, 347, 348, 352, 353, 361, 364, 370, 377, 378, 382: n = A,T,C or G
  misc_feature 454, 464, 467, 470, 482, 489, 507, 552, 554: n = A,T,C or G
tggggggaagcgtacctntgggggaagctacctagcattaaagtgcaaggaactggagaatggggggaagcagngtctcttagacactaagcgggactttnnttcccngnggctnntgncaagngganccccaggaancnncctctttntgaatcncnaccnggngccccnnggagcnaacnaggcccncttgngcntgctcnggaccgcntaaaatgaaangtcnccggtgccgcnctcttacatagctgttctcatggtcttcactanaaacgactcgctacctgggtcacaagcgccggatgcangaaccgctttctntttanatgaaaccagcttngtntggnntccnntcatccgnggnaagaanatctcgnnatgncttgcttgtgggaaaagacttgggggacttgttaaaaattcctatttggattaagtaaggataccaagttgntaccctgggnttnccngccctctggggngtaagangacttggaacctaagganggttccaaaacattagggtttggtggaaataaaattaaaaaaggncntttaatggggctaaaaaa

SEQ ID NO: 3689 - DNA, 125 bp, Homo sapiens
  misc_feature 34, 83, 108: n = A,T,C or G
tagggaatttctggaatggtccccttttttatangaatggaaaggaaagggaaaggggttttaagccaaaggggcccatttcnaagggattaccaccaggcttaggangggaaccgaagaatggg

SEQ ID NO: 3690 - DNA, 526 bp, Homo sapiens
actagttgtgctacaggactggaaagaagtcaggtggtagcagagatttcaactagaagtgactgcagcgatccacatggaaggggaccgggaagaaggtgaggggtgatgagaagacacttcacttggagacaagtatgtgttagagaactcaaggtgaggccttctgtcactgaaattcaaagctcaaatggatttgagagacaatttaagctaaaatttccagcccggggcactaatttgggaatgagggctctaacttctttggaaactttttggggatccctcccctactgcgactaggaagacttcaatctcagaaagaccagaaccagaattcttatggaccctaagctgcaaatggaactagaggtcacttctgtgtccagtgctttatttccaggaaccatcatcaagacagttcctaaaatatgattggctcatttgttctcactaacatcttgggatttcatgatcatgaaaaaaaatcatttcatgattttttaaaaatccaagtggtgatcta

SEQ ID NO: 3691 - DNA, 411 bp, Homo sapiens
  misc_feature 25, 37, 43, 46, 49, 107, 121, 128, 139, 176, 219: n = A,T,C or G
tacccttgggcatttaaaagttcangaaacttggagnggcccncantcnattggaaaagcccctttggggtcaaacttttcaagcccttggggtccttaacaggaantccccaaaataccnaaccccnagaatggccangaagccttggggcttggcattggggccaaacttggangaacccattggcccgggggaaccaaccccaaccccaacccttnaaaggcttaagaacaatttcttaacttcctgggtctttcaatggggaggggcttggtgggtccaatggtccaaactttcatgggcctacttgggacttcttgtggcctttcaagtaagggaaagggagggaagtgggaccaagaaaagcttggggggctaagaagaagaaaagaagccaggaagaaaaagaa

SEQ ID NO: 3692 - DNA, 208 bp, Homo sapiens
  misc_feature 43, 70, 75, 126, 165, 180: n = A,T,C or G
gcacccatgcctggaatttaatgaagcactttcttctcaaatnttggctttcctcctgaccctcccaatntactntcaaacggttgaggagaaagaagaaatacccatcgacgtttgaatcatgtntggtcggagaaataagcttgttgttaccactgtttggtncattgggtaaattantctttacatttaaaaaaaacgcacttac

SEQ ID NO: 3693 - DNA, 570 bp, Homo sapiens
  misc_feature 21, 29, 36, 42, 58, 61, 63, 69, 135, 143, 166, 213, 214,245, 249, 258, 263, 270, 271, 310, 325, 360, 368, 373, 381,384, 395, 414, 426, 430, 433, 445, 449, 453, 461, 466, 481,489, 497, 514, 519, 534, 538, 543, 547: n = A,T,C or G
gtagactacctagcattaaantcattaanttgcagnggaggnctgataatcacaagantantnttccanggtggcccaccttgtttgagccaagtgcccagcaccccagggggccggggagccccttttcaaggngaccaagngcttgggagcttagaggggaaanacttccaagaagacttttctttgccgcttggtccttgggggacttgnnaccaagggaccaagcccaagtggaggaaaanttgncttggactncattngggaccnncttgtaagaaggcacccggcctcaaaagccttgggaacntcaaataaggtgggnttgggtaggctactagggtggaccaaaagaaaaanggggttgnaaacnataacaangtntccttgccagntaaagttcccacaactttntttccaagatcntggngcnccacaagggganactnttgngggggtanaaganccaagggtgggtggnaaaaactnggggcttncctcttggcctcacttnggagnaaggggacctttttntttnttttnttcnaaaaagcaaacaaaacccccttt

SEQ ID NO: 3694 - DNA, 539 bp, Homo sapiens
gagacatggtttaaggactccccaggggcctcacatcggtgtgaggtggcagatccaggatacaaacccaggttggtgcagatccaaggccctgctgtttttctgcaacattctgctttgggtgtggcaacttggtgaggtccctcactatttctctggctctccgttgcctcagagcaggaggactatgagccctctgcgctgccatgtctgattctgcggcctgtgagcccaagggcctcatgagctatacagatttatgccaagtgtcttctcctcatcacttccctcgtcttgcaggactgactagctgtggccagtggggtccgaaaactggggccccaagagataagggctgtgccaggtgacatgcagatcaatgaagacacgcccttccctgaccacccagtcaactcgaagcctagtgcctgcctaacctaccctgcctaattagggtgctcttgctgtgggcaagtggggtgaggtgggaggaaggtaagaaaccactgaattaaaggaactctgaattgaaaaaaaaa

SEQ ID NO: 3695 - DNA, 530 bp, Homo sapiens
  misc_feature 443, 512: n = A,T,C or G
ggtattaccaagaaacagaggcaacaaaaacacactgtaattgttcaagcaatttggctcttcctctttcatataatggtgaaatcaaaaccctggaggccagagaactagacccaggagtcagaagatggaattcttatctgacataagaatgggcatgcgatccaggatcagccaatcagagagctgctttcccttggaaaacaagatgggccatatgatccaaatgaggttttatcttttaggtcagggagctggaataatgtaaatcaggatctgccagatgccatcctcccctcttgctgccagtggggaaagatcttccagctgtaggagctaaagcaggaaaagaagcaagagtgagcaagagagagagattcagagataatgatggacctcatttttgactctggatccagtgaagtctgagggttggtaaatgnaacatatgtccatgaattatttgacacttcactcttcaactcttcaacagatgaagcctaacttccctncccttacatgtgggccca

SEQ ID NO: 3696 - DNA, 195 bp, Homo sapiens
gacagtaatgcttccaagctagaggcattcaaggagtggcccagagaacatgtcattcagggcctggaagatttccatcagcattcaggggtctacagtcctacagagctgtaatacagcctacggaaacgagtttgaaaatggaaaactatgctgaataaactgcttatgacccaacatcattccaaaaaaaaa

SEQ ID NO: 3697 - DNA, 221 bp, Homo sapiens
  misc_feature 74: n = A,T,C or G
gtggggtctttcagtgcccggtgtccagcctggatgggctgggagtgcagctgggagcttggagcatcctgggnggagaagcaaagcaacaggactggcacgtgatattaatcatcccggaatggaggccttctgactggagacttgcagtgtacctaccactgctgggtgttttcagcatttcagtttggcaataaacataaaaagtctagtaaaaaaaa

SEQ ID NO: 3698 - DNA, 263 bp, Homo sapiens
atccatcctatcccacaaaaggaaataaggaaggaaagtgatccttctcataggtatcactgagaagcaccagcaggaagaggaggctggaagtgtgcatgcacatgtgtgcctaacccacagggcagatggtctgcaccagaaagagcacatctgagagctgcacccccttcaatgcctaacaaagagctgactaaggtatttggctctggccacttaccaagaaattatatcatcattaaatcctgtgggcaaaaaataaa

SEQ ID NO: 3699 - DNA, 194 bp, Homo sapiens
  misc_feature 28, 35, 39, 40, 41, 49, 82, 84, 103, 105, 112, 116, 128,149, 170: n = A,T,C or G
ggtcttataagaagaggaagactctctntccaccntgtnnncaccctgngaaaacagctgccataatgctgcctctgcgagncncatggatagcccttgctgngnggtcacncatnctggcaccctgntctcacactttcggcctccanagttggaagaaaataaacgtntgttgtttataagccaaaaaaaaa

SEQ ID NO: 3700 - DNA, 196 bp, Homo sapiens
  misc_feature 26, 36, 37, 61, 67, 71, 73, 85, 87, 90, 115, 128, 138, 149,150, 167, 177, 178: n = A,T,C or G
ttcggagatgctgtccctggatccgnttcttggatnnattctgctcatttatgacttacanccgtgnaatncnttgacctgcttnanttnccaatactgaataaagcccaacccntctaataaaaatngaattggccntgggggccctnnttccaaggggggggatntccccaacgnntggggagctcctgcttta

SEQ ID NO: 3701 - DNA, 492 bp, Homo sapiens
  misc_feature 16, 18, 21, 24, 30, 32, 35, 39, 50, 66, 83, 103, 120, 164,195, 261, 287, 303, 314, 341, 379, 391, 392, 415, 457, 463: n = A,T,C or G
cgtcgcaaaagcatgntntcntgnaacccnanagnaaangggatggaaanaataggcttgccccanaagaatgggttggccantaaccaaactggcttttccnttcctggaaccctcccnttgggaaaagttaagtaaagtttggaacctttttgccaagtttngaaaagtaactttttcttggaaagggccaanaaaaaaaggcttgtccaagccattttttatactggacctaaacttttctttcttcttggaaaaggnggaaacctccccttcatttttcccanaagtaagtccaaaggnaattttcttgnggccttcttaccccatggggctttttngggttaccaacttcaatcccttgggggggcctttgggnttcttttcttgnngaaaaatgggaataattcatttncaagcacttcacccacctttcttaaagcttggggaagtaaanggcttnccacttttggccaaaatgcttggttaagt

SEQ ID NO: 3702 - DNA, 132 bp, Homo sapiens
  misc_feature 19, 30, 35, 47, 54, 77, 86, 87, 104: n = A,T,C or G
cccccttttttttttttangggggccttgnaaaanttttggaaaaanaaccacnccaatttttttttttttttggancccccaaannaaaccttttgggggccnttttttaaaaaccctccccttttggggg

SEQ ID NO: 3703 - DNA, 314 bp, Homo sapiens
  misc_feature 23, 43, 62, 71, 100, 116, 130, 136, 139, 144, 149, 158, 166,175, 201, 207, 209, 220, 229, 235, 249, 288, 292, 295: n = A,T,C or G
agagattgaaggcaatgccgaancccattctggaattctgggnttccccaggaaaagccagngccggggtnctcttatgggggagaaaagaaattcttcncggtcaaggcaggtcnaccaaaacttacanttttgntgntaacntactncaagaaaancttaaatnctcactggntcattcgccttccatacctttgatgnaaaggntnagagacttttncccttattntttcancccctgggaaaatntgaaagctggccctgggggaaaagattccttttttaaanccanccnaaaaacccccaaaaaaaaa

SEQ ID NO: 3704 - DNA, 462 bp, Homo sapiens
  misc_feature 313, 329, 373, 445, 446: n = A,T,C or G
ctcagtgcctggtgcctgggactgaagaccagagccccctggagaccaaaagagccagctcccagctgtgagcagatcgggtccaaagatcacgggctcggcggcaggaacctggtttggtatccggctcctctgcggactttgaagtgctttaccgattcacatgacaactgggtcctggaacaactcaacccttgtaagtgcatggctcagtgagatcgtggagctgacatagggctgacctggctctcagaggccccagaataaagctggagcccctggggtccacctgctggcatgaccatgggacaangggcgtggaacttganctgggtcaaccacctgggaacatagtcccctcccgccaggcctntggacccaaccttctcccttgttggtaggcttctcccttccctacaacaagcacttctgccaccacttgggnntggtggtttgaaaaat

SEQ ID NO: 3705 - DNA, 270 bp, Homo sapiens
  misc_feature 225: n = A,T,C or G
gcttccattgtttgcaacatctttcctggctggtggaggaaaggcaggctcaactgatggtcctaatctccaatgggggcaataatattgcccaccctacgtgctcttttggaactttgctactctaaagctgaaaaattctggattatcctccaagatgtaactaaaccatcagcttctgtggaaatacttcccagcttccccaagcaacaaggccatccctcntctgtgcatgtttaataaataatttgtttgcctgttaaaaaaaaa

SEQ ID NO: 3706 - DNA, 260 bp, Homo sapiens
  misc_feature 20, 36, 55, 58, 89, 104, 119, 146, 163, 205, 206, 211, 227,237: n = A,T,C or G
ttcgtgaagctgcctagaanaattaacacctttttnatcccatggactccaccantgngctgctgtgcagtgtccctattagacaattncgagttatctctaangcattgaaggcaggngctttcatttaatatattgcctaaccncaatgaaactgccaatntgtgcggccaataagctgtgtcttttgctcattggggctttnncagcnccttgaactctgcatncacctagccnggccctttttaaaaaaggggggg

SEQ ID NO: 3707 - DNA, 265 bp, Homo sapiens
  misc_feature 66, 72, 89, 93, 105, 139, 177, 189, 193, 214, 238, 250: n = A,T,C or G
atccgtgctcccggtatcccagtcaagccgggttgaattctcccctgaaattcttccatcactccngaagcnaagaggcaagccttgangacncaaaaagacccncttgttagagatcagacagacattgggttttganctctctgaaatatccgcttcctggctgagtgacttcgnatattgacccgngaantcccgatgaacctgatgctgnaacacgttagtgcacacacaacantatgataggtgngataatgctagaccc

SEQ ID NO: 3708 - DNA, 209 bp, Homo sapiens
  misc_feature 18, 42, 46, 47, 63, 79, 84, 89, 110, 127, 130, 136, 140,165, 166, 173, 176, 185: n = A,T,C or G
gcacaacctatatacctnacatctttcgttgcgataggcaancagnnatcgtgcaatccccanttatgaactggggaanatttnattanttgactctccctctagtgttngctatctttgcatgccnctnaccagnctanatcattcatagcccactccctttcnnaaaggantgntttgaaacnacactctgctactcttttgttgcc

SEQ ID NO: 3709 - DNA, 209 bp, Homo sapiens
gtaagacaaagctgcaaagtttcataaagtctcaacaacggccaacatggaaattggaaaagttagaacaaatagaccaagcctggggaaatttactgaactctggggctcccttccaagtatggtgatcggtaacccaaattaaactcactaaggtgtcctgaaaaaaatggggtcaataaaagataatgtcaatctggaaaaaaaaa

SEQ ID NO: 3710 - DNA, 587 bp, Homo sapiens
  misc_feature 85, 94, 124, 140, 151, 170, 228, 291, 314, 398, 434, 491,505, 516, 541, 545, 557, 569: n = A,T,C or G
atcccgcccgtatctactgaagaactaaagaactgtgaacaatccaattgtcttggctcagctgacaacacctggcaaggtggcnaggtcccanaggagaaggagtcacaggctgtgtcatacncaccaaagcaaagaanatcttgggcanctgtacaagtgtccctcanggagagagccctgtgtacccagagggcatggaagcttcaaggagaattcttgagccantggctgtgaaatgggacaacccagctgcatcctgcctgatggtcctcccaaacctgcaactgntgggagtggggttatctcaaaangctatcaatgtgccgtacattatgaccctggagacacatacagtcttaaacaaaaaaggctgggaaacctgaattgagcatggnaaggtcaaaataagaaagtaacttatttataccccnttttattcttttattccttttaaaatttggggggcatattaaaggggtatatttatnggattcatgaaaanttttgatatangcctatttaataagggataatcccntcanggggaatcccancccccatttatnccttttttttttgtacaa

SEQ ID NO: 3711 - DNA, 311 bp, Homo sapiens
  misc_feature 21, 31, 43, 50, 52, 60, 62, 63, 95, 100, 103, 108, 110, 165,182, 243, 261, 269, 270, 280, 288, 296: n = A,T,C or G
gaaccacaatctagtccgtgntcttgaaccnccttgccttacntgtgaananaaagctantnnttgacaaacgtaaacaaaaaggggcttgaacnggaantgnttcangngaccgatgcttttcagagcttggagatggctcttatgtaaaatcacaaaaatgcnccttgcttctaacattnctttttacttgcagaagtatggcctcttctttcataaggttagacggataccgagctcganctgccctcgttgggtctntgggaaanntgaaacccgnggctgganaaattagnaactgtatgctttaa

SEQ ID NO: 3712 - DNA, 266 bp, Homo sapiens
ggaagactcacagagaaacaaagctccgagccctgtgtttcgggaagtcacccctgtgatgtggcctcagcaagcagaaatttgaaggagcaggtgggggtgtgagacccagcagtgatggtgcccttcccgcctcctggccagaggccctcctgcccatccctcccggagcccacgctgtcctccgtggggctattggaaacctactctgaaactgttataaatactcaataataaacaaacatgagttatttctgaaaaaaaaa

SEQ ID NO: 3713 - DNA, 135 bp, Homo sapiens
  misc_feature 38, 39, 44, 65, 84, 117, 120: n = A,T,C or G
tcctccttgcagggctgccagtggctatgctttccacnnaatancggggcacttgtattagctgnaaccccaggacaaaaactngtggcaaggccctcttgatggccatggtgcacnagngaaagaagctagaat

SEQ ID NO: 3714 - DNA, 144 bp, Homo sapiens
  misc_feature 16, 17, 27, 80, 104, 122: n = A,T,C or G
ctctgcagaaacccgnnaccacagganatgggtttcggtaacccaagctgttttcaaactgccggacttggtgataaganccttgctcggccctcccccctggngggcttggggagaatttncccaaaggggggggtggggaaa

SEQ ID NO: 3715 - DNA, 226 bp, Homo sapiens
ggttgtataaaccactcttggtgtttaactggaaactgaacaccaagagaaagctcaacaggtttctgaaaagtgttaacctggaattccaggaaagctggtcaatattccttctgactcagacatttgtacaagcttagagaactgcatctgatcaaggaagaaggagggattctccacagtttttactactgagtaaagacccctatgaactccgaaaaaaaaa

SEQ ID NO: 3716 - DNA, 153 bp, Homo sapiens
ggattactgcagctgctactgagaatactagagtactgcatggtgcaaaggaaaccaggaagagaaagaataatgcagatttgaagatggaaaaaaatgcagtttttatagaattatgggaagtaaaagtggagaggatcttaggaaaaaaaa

SEQ ID NO: 3717 - DNA, 374 bp, Homo sapiens
gagagacttcaccattctgcctttatctggcaaacactcagggcttagaaaatggaaaaagcaaacccacaaacgaactacaggccaatgtttctgagatgacagacctggctgctgtccctgcactgaggataaagagcacacgtgacctcatagatcgtggactgaacactccagccacgtcctttcttgtcttcctggtgggttgcgtatccacaggacagctgaaaatcacctttgaacaaacccacactgttggatttaaggagccgtgtttcacagtcctttctgctgccccagtagtgcaggtggacctagtgaagctcttcaccaaaatgtgtgtgtacttgcccagcgcacactctggctcgttg

SEQ ID NO: 3718 - DNA, 431 bp, Homo sapiens
  misc_feature 390, 405: n = A,T,C or G
ctgttccaacatctgcaggaagaagttagggaactcccgaactctgcttcctctggagtggggcccaggactccacagtcttctagcggtgccacaaggagcagtggccactgggtggagagtatcagcaggaaggctgctgaatggccacctcaggtgacactccaagcagacagcacatcccccatggccatgtcagaggcagtgggctcagccacaccccttagcggtgagtccccaaccctggtgactcgtttctttctcctagagagaacatagccccgtgtctccagaagctgtggcttctccctgggcccccctgtgtccccagtggcacatgccttcctatgcctcttcctcgattgggacctctgggtggatatttgaacntcaaataaaattggnatgccttttcctctgttaaaaaaaaa

SEQ ID NO: 3719 - DNA, 154 bp, Homo sapiens
  misc_feature 21, 34, 47, 56, 72, 86, 88, 95, 104, 105, 111, 115, 137: n = A,T,C or G
gccgctaagggttcggggatnccgcttttatctnttggcgcgcctcngtagttgtnaccctaaggagggggngtctatttgttttntncacctcnaccaaaatnngcccantttngggcaaaatgggtggtaatganggctagttcccgcgccg

SEQ ID NO: 3720 - DNA, 221 bp, Homo sapiens
agcgagaaagcaatatggaatccggctgaatgtccaagatcaccaggcagtgtgggtgtatctttcaggagcctcgagtctggggtcagaacaaccggtgttgaggcttgcaaggatgtgtatttattgagtgaccttaaagaaaataagttccagaaggctgtttctgaatctgtgagtaggaataaaataaaacttaccctcaaggttgcaaaaaaaaa

SEQ ID NO: 3721 - DNA, 467 bp, Homo sapiens
  misc_feature 326, 344, 357, 367, 387, 391, 400, 420, 450: n = A,T,C or G
ctgcagaaataactgttcaaccaactgtggaagaggcctctgacaactgcactcaagaatgtctcatctatggccattctgatgcctgctggatgccggcatctctggatcattccagctcttcgcaagcacaggcctctgctctatgctacagcccaccactgtcacaggcctctactcagcaccacagcccacgagtgacacagaccattgctctctgccacagccctccagtgacacagaccatcgcattgtgccacagcccaccaccgatacaggtgtctgctctccaccacagtcctcctctagtgcaggctactggcttnaccacaggccaccattancacaaggcttaancctttggttnaaagcccttcctttaacacnaagnctgggtggnaaatcaagcccacaagcttnttcctttttggccaacaagggttaattggncccttccaatcgggaag

SEQ ID NO: 3722 - DNA, 267 bp, Homo sapiens
  misc_feature 113, 157: n = A,T,C or G
gtgaacagaaaaatactactggcacaaagaagctttggcacccttgtttttcgagggcgaaccctctgaatggggtactttgaaatgtcaatgagaagtggaaacagcttccnataccactgggaattttaactttttgaaccaaaacccccaaaanaacagggagtctggaaccatgcctcaatcaccttgataagtttgccccaattcttgcctatttacttttgtaaatgtgaaataaatgtgtcctaacaacccaaaaaaaaa

SEQ ID NO: 3723 - DNA, 366 bp, Homo sapiens
  misc_feature 171, 320: n = A,T,C or G
gattttagaagtcgactggaaataagatggaaacagcagtacactactgaacattcctataacacaataataagaatctcctcagctggtgtgaaaacggaaattcaggacaggaattcaatgcttcaactttaaaaccaacctgttattggctaaagaaaaatggtgacnaatgctaagtacttgagatcaaatacataagaagtatatttgagactagcttggattaatttgattgaattaatgtttggatagctggcatttttaagtattagttgcaaacaatttagtggacacaataaattattagtattagttgnaaacaatttactggacacaataaaaaatctcacttttaaaaaaaaa

SEQ ID NO: 3724 - DNA, 141 bp, Homo sapiens
  misc_feature 20, 76, 82, 102, 103, 106, 123: n = A,T,C or G
cgcccacatatgggtccggngagcccgatgaactttgatcctagctaggcctggataaagagtcccaccgggtgcnacatanctgcgctaacgactccttcnntantttcacgactcgtggcnagatgctgcctaaagcaa

SEQ ID NO: 3725 - DNA, 461 bp, Homo sapiens
  misc_feature 367, 377, 384: n = A,T,C or G
attctcttctacatttcctaacagtactcttgggaagatgaaagggcctctggagattctttaaaaaaggattagaaatgactatttgatagcattgaattacactttgaatgagactgaaatttccttcattcctgaaagcaaaaaatgcatattggaagtatcatttgtagaatgatatatctggaaaattccagagcatagctataccatctatgctatttatgagacttgtaaaaacgaactagtagctatcttttgtgaaattgtaatatgttcactaatacaattctgctcatctttaacaattgccaaagacttccccaacttcccaagctttcatccattactgaaacacatcaaggcnagggagaaanttttttngtgtttaaacactcaaagttaagaaaacatgagagagatgaaagttatctgagaaaataacaggagaaaaaaggtcc

SEQ ID NO: 3726 - DNA, 330 bp, Homo sapiens
  misc_feature 16, 32, 38, 43, 75, 76, 78, 80, 85, 86, 93, 130, 132, 141,160, 161, 212, 220, 228, 254, 255, 278, 288, 290: n = A,T,C or G
aatcacaacctaaaanttttccagaaattgtnactcanagaanttcaaagaatggtgccaccgccaataagaacnngnanaaggnnccacctnttgggatacccccaagctttgcttacaccgaaaagcnanaatggtttncttttttttttaatttttnnggggaggaacaccccctcaacttgggggtttggccccattgcttggaagtngccaagtnggtccccnaatctttgggcttcaacttgggaaanncctttccggcctttcccgggggnttcaaaggtngnaatttctttccttgggccttcaaaacccttttcttggagg

SEQ ID NO: 3727 - DNA, 179 bp, Homo sapiens
  misc_feature 17, 30, 33, 52, 69, 73, 89, 91, 94, 112, 116, 118, 126, 132,142, 155: n = A,T,C or G
aagcggttgggattggngacctattgtggntgnacgactctaactttactangacgatttcgttcgatnatgnttgtcgaattcacgtnanttnctcgcgtgaggatttatntaantntggtttgntgctcnctgccttgcnggcctttttgatnaagcaaaggcctgcctattatact

SEQ ID NO: 3728 - DNA, 403 bp, Homo sapiens
  misc_feature 346, 348, 361, 363, 373: n = A,T,C or G
gaaccatcttggatttccagctttgcagttggccttgctaaaaattctcctcggcttacacatggagtctcggaatcccaaaaagaccctcgatgtcaacctgttgtcagactcttgcaaacagcactcacttgaaaaacggtggctgaaatgtcacttatcatcaaggccgtgatgtcttttccatttcaaaacctcaacatgagacagtgctttggggatgaacctttgttatatagcaatagataattgttgtattagactaaatcttggtaaattttatagctagtatatattttgtagctgaagttacaacattgttacatagtttaaaaactctgactgngnattaagtataaangngagggaaatngaaaatactggaaaaacctaaaagaataaa

SEQ ID NO: 3729 - DNA, 455 bp, Homo sapiens
  misc_feature 365, 376: n = A,T,C or G
atgccaatgtgaatgtcatctacatctgctcccatcatatgaatgacgagttagtgctgtattacaaaaaaatcctaagtctacatgcagccgtcaaatctgggaaccttgaggacagaagtgacctgcaggacaggttcaaaattatcacacctgaagctgtaaacatcttccctatgatagagcagctgagtcagctgataactgatcacctgcaaatacagcgctggctctttaaaatggactctgagttccgaggaaatgggactgcattttgtgatattccttcctacctaaagtgctacaaatgggtgctaaaggagagtagcagatatggccttgaagactggagaaagaaatgggcnccagaaccccntttgggggaaaatctttgaggagctggcgggcattttagcacagcacgcacagccagtcaatgagaaacggttcccgac

SEQ ID NO: 3730 - DNA, 124 bp, Homo sapiens
  misc_feature 20, 24, 42, 75, 78, 83, 91, 100, 108: n = A,T,C or G
taaatattaagggaattagngaanccaaaagctagataaaantcttggctgagagcagtctaaattagttccaantgnggttntcaccacntgcaaactngaaatttncatccataaaggcgtt

SEQ ID NO: 3731 - DNA, 383 bp, Homo sapiens
cagggagaggatgtacaaaccctgaagaacagaggcaaacatttcattgtggacaaatgctgtgaaggaagaggacacagctcttgagtgtccatacttgggactctgtgcgcttagggtgcctgctttacctgcctgtctgctgtcatcagaaagctcgaggcactatcaggagtgaccacccaggccaggcacacgtttgctatgcagtgcaaggagcccactgtgggaggcaccacaccaggcccagagactgacactatgacagacattgcctggcccgggctccctatggaatttgcaatctaatgtagaaaaacaaacctaggtaaaccagacagcattttgctaattccagtcagttgattcaacacaaaaacaaa

SEQ ID NO: 3732 - DNA, 102 bp, Homo sapiens
  misc_feature 26, 30, 34, 55, 58, 65, 77: n = A,T,C or G
atcttacccctacctgttacgactgntcangacnttacctggagggacttgtgcnttnatggggnttgaatttcagncaactgccctatacccccaaaactt

SEQ ID NO: 3733 - DNA, 423 bp, Homo sapiens
  misc_feature 43, 100, 125, 127, 152, 186, 251, 258, 272, 292, 333, 339,341, 357, 377, 378, 388, 399: n = A,T,C or G
gcccaatggactagtgaaggaaggaagatagcagacctctccngctagttcagtcaaggaagagaagaaagatattttgtgtatcaagaaacatcaattntcatcctgcctctgccatcactcgncnaaggaagggactgcctggtccctangctcctcagctatccaaaaaagatgtgaaccacntgatcttgaaggctttccaaacctgctcttttaacatttttaaggatcctacatctatggagtgnttactgngtgctttggattgncctaacttcttcatatgcancgcctcactttggtttcacaacaccccggtccactgatatnattttncntttgcagaggaaaaanttggagctcacaaagccctnnaagcttgaanttctagaggangtcttcctgtcccagggaaatgat

SEQ ID NO: 3734 - DNA, 422 bp, Homo sapiens
  misc_feature 78, 107, 128, 159, 174, 191, 204, 220, 244, 306, 345, 351,367: n = A,T,C or G
ggaaaaatggacccaagcctttttccccgggaaggaacaccttgggggggggaaaaattgggtccgctttccttgggntttaaaggaatgggggaaaaaatggcccnaccatttccttttttggtggncccttgtccccaagccgaggaaggttcttgnttttcaagaaatggnggaaaggtaccatgccnatttggaaaaggnaagaaatcctttaccnattcattaaatggggaccaaaggnacccttggcattttttggaattcatcaaacaaagccttgattgaaaaaagtctttactggtnaagcaagtgggcttgaaattgccccaccccaaccagaangctttnctttcttggccagaantcttggatggtttgaggaatttgactttgggaggcttctttccgtaaaatttaaa

SEQ ID NO: 3735 - DNA, 577 bp, Homo sapiens
ctccttcaggttggaaggaatacctttacttgggggcatgtcaattcgtttttctcacttgattcatctttatgacttcctgaggacagatctaattctaaagtaaccagaagcctggccatctcagagcagcaaatccctcaaccttggagcacaaatgatcgctgatagagtctgcataaaatcatcttcctctatctgacagccatgagcagagccttgggggtaaaaaaagccacagccttaaatctcttcactcagaaattaccatgaagataaaataaataaatggaaaggactatcaagaagccaacaaaacataaacaccaaaccaactcatcttgtttcactttggaaataaactgttcccagatgtgagaccaacaaaattaatattaagcaattaaaccagtaaattataaactgatttatcatttgggaagtttaaagtcagagagatgaggtcctgtagccagaattacacatcatttcaaaatatgtagaccaaaagaaaactggatgaacagagaaacattgcagcaatgcacagtcttaagaccaatgggtgtgtttgcag

SEQ ID NO: 3736 - DNA, 194 bp, Homo sapiens
acgtcgtattaccacaaagggagccagctgaaggaaaaagccaatgtcctgcggagagaaaagcagagaaatggaggctgcttggctcctttgaggacaccttgagccactcatcgtaccacacctggaacccactacttctagactaactattatatgagataatacatttccttacatgtttgaaaaaaaaa

SEQ ID NO: 3737 - DNA, 295 bp, Homo sapiens
ggttggtaaacagtctccagttgcacaattattaccagcaaaacatctttctccctgcagttcatagtttgtgatggacaatgaatatgcatggagagggaaatggtggagatgagcctggagcttgtgaacgtgcagaatcagtacagatcaactctaccaactcctgttttggcacctagtcccacctttgctcctgggatcatgaatgaaagagattcatctaattcctgaagaaacggctcctcttcctataaaagctcacctgtggacacagtctgcagaaaaagaaaac

SEQ ID NO: 3738 - DNA, 433 bp, Homo sapiens
  misc_feature 243, 309: n = A,T,C or G
gtccttcccagtcctgtgtcctcctaaaaaccagacactgaggaggaatgtgggccatgcctctctgagtagcagctgtgtcttgctggttgaccaagccttcaggatgtggaatgcgctctaactggaatttcagatgtcagaaggaagggaggcactgggcaaaacctcaccttttgatggggaagaaagatacagaatgaagtcacaatgaggcccaatgtgagccacatgtgagaccangcccagagcagcgggtagataaactgctcaagagaaaccgctgttcaaggccgtggatccgctccntaaacccttttgatcaactacttatctagtggacaagaatgaccccgaccgctggcagctcttcgatgtggcctcagtaatgctctaaggtggaaaggggaaggctctgacttcacaaaaaaaa

SEQ ID NO: 3739 - DNA, 565 bp, Homo sapiens
  misc_feature 507: n = A,T,C or G
atttctgattattgaggggaccaggagtcaggaggcctccagcaaggccccagaatactctggcagccactggcctcactggatctctgggaagacttcacaggactggattaaattagagcacactggcaatcaaggtctggcttcaggtcaaccttcaccttgcacctggctacgggaagccccttgggatgtctcaagaaagtcttccgaccttctttggagattccaggccattggagtagcccttgatttcatcaagaccagctggacctctctctcctaggttctggaaatcaagctgtgatttcagatggacttgggcctccagaggagcagctgatttcccccagaatccctctggacgtttgtaaataccagaaacaagtggccactgtgggacagaattctgtggaatcaaactggacaggtggctaaaatcagtccaggaacctgagagagcaatatgaagaatctcatggagagagagcagaaactgagaatatnctgacagctgatgacacaccagatgctgtaaaaagaagaaatcaagcccccaactaat

SEQ ID NO: 3740 - DNA, 330 bp, Homo sapiens
  misc_feature 274: n = A,T,C or G
aggtgcactcaggtacaccaagaagagaaaatgcttgctcagtcattgggaacttttttgaaaattggtgctttgtgcccagcaagacaatatttctatttggccaaagctgctttgtcagaagatatatgaatatgtcctaatttttgcaaaaaaagaaatgcagaaaggattaaccagaaactaatgggattgattacctaaagcaaaaggatgaaaatgaatgagaaagatggaaaaagatagaactcttctgattatatttttatatagnttttactcttgaaccacataaaatggtttactttttttttttttttgaaacggagt

SEQ ID NO: 3741 - DNA, 426 bp, Homo sapiens
  misc_feature 45, 70, 74, 93, 107, 115, 128, 139, 140, 156, 164, 168, 247,305, 314, 327, 340, 343, 347, 359, 378, 385, 392: n = A,T,C or G
ggatgcattcactgaatcagaggatcctgggccaggagagctcanaaagacctttggatcaaccactcantggntaccgaaggccagcctgcnaaaggtgccatggntgttaaanatccggttcccangcctcactgcnnacactgagtccatgangacccaanccancatggaggccagccgcacttccaggactctgatacccttctactaaggacaaagtaaaatacaaaaggctctggggcanagcccacttgacccagggctgagtttagtgctctaaagttcctccaaggagtctttgntgcttatgntttgctttttggngtgtgcatgtttnctnacangtgaatcattgngtgccccccaaagcatttngtttttnaaaaaanttacacttgtgaaaaatggggtaggcactttctg

SEQ ID NO: 3742 - DNA, 388 bp, Homo sapiens
  misc_feature 279: n = A,T,C or G
gtttgaactctgcaggatgttggcctggggttgctgatagccattctacctccatatggaactagaaaataaaccaccacagaaaaagcagaaatgcacaatgaactaggtcgtgtcccaatgacgtcgtttgacccctgactccagcctgacctggacttttcaattccttgaactaatacattcccccttcttgctgaagtcatggtgagcctattttcctgtcatttacaacaaaaagagtcctgacacaatgacttttcaaaaatcgtcactctnccacgaacccttgggagcgtcagggttaatgacattctgatacaacttactgtttccatgtctttgcttaactatctctttctcaagaaggtctttcctgaaaaaaaaa

SEQ ID NO: 3743 - DNA, 449 bp, Homo sapiens
  misc_feature 17, 102, 106, 108, 129, 134, 137, 170, 177, 184, 189, 192,193, 194, 200, 224, 226, 262, 271, 273, 274, 283, 284, 298,306, 312, 313, 319, 328, 330, 342, 345, 349, 350, 356, 357,363, 365, 370, 379, 401, 409: n = A,T,C or G
gccttgagtctcacatnaaactttggacttcagactttgggttgatgctggaacaaagatgacttttggggactatcaatatggaatgattgcattttgcantgananaagagtatgagttttgggaanggccnggngtgaaatgctatggttccaggcttccaaatctnatgtctnaaatttnatctncannnttggangagggcgcctaatataccagcggncngcgtcataaaatttacagcttgccttcttggccttncattttcananntgggccaannttgagggttacctnctttgccncctttnnaaattncccgaatgnanaccccctatttnatnaaanntggagnnccattngnggtgnggggtgttntttcttccccttcacccatggnggattgtnttgcaccaccaatgcccaagcctcccccctttttttttct

SEQ ID NO: 3744 - DNA, 416 bp, Homo sapiens
  misc_feature 299, 357: n = A,T,C or G
ggtctccatgcagttctcttggtgtgtttgctctctgaacactcttgagatgtacctctcaaaacccagctgtccatctgtgagaagcccaagccacagggagaagccaagtgtagacactgcagtagcaaggcccagctgaatgcaatctccaagttatctcagcccaggaaccagacatgtacgcaaataaacctctgtaattccagccccagtcatttaatcttcccaactgagcaccagatatggtgaagagacaagccattccaatcatgcccagttctaatggccagaaggtncaaaatccataaagatgttagaatggctgttgtttcatgccagtaagtctggggtggntttatgcagcaataaacaatatataagctcttaccaatgagaaaaataaatagctatct

SEQ ID NO: 3745 - DNA, 424 bp, Homo sapiens
  misc_feature 32, 39, 51, 53, 177, 184, 267, 357, 376, 384: n = A,T,C or G
gaacaccttttgtgttattagggttttgccanggtttancttgactaggancnactgcctggagaccttgatcttgacctggaatatggtgatcgggaacacgacctgtgtcgagaaaaggaccttgaacgagagcgcatcctttggggtctttgagaaaataaggatttgggtggngacacanaatctctacatggagagttaaaagaagaacaagaaggagacacattgaacaatgaataggattgtgtgccatcccaagggtanctcagtttatcactttcatcttcgctgtcatcaaacaggccatccatggctagtcctgaatttataaacataggtagtttggagaattgntcattactgaaatcactgnccctcaantcactgggcttggctggttcgccgccaaaacaggcttgct

SEQ ID NO: 3746 - DNA, 141 bp, Homo sapiens
  misc_feature 26, 37, 51, 78, 79, 82, 87, 89, 95, 110, 123: n = A,T,C or G
cccacctgggtaaaaataccagcccntgaacccagancctgtcagggaggngggggggactggcaccagtgggggatnnagnagganantctgtnatccaggggcgaatnccggccctggggntttatttgcagaccccct

SEQ ID NO: 3747 - DNA, 154 bp, Homo sapiens
  misc_feature 19, 20: n = A,T,C or G
actctggggagctcctggnnagctacctgctgagggtgtatttcactaggtatccacaggtcaagctatgagaagacagaagtttcatgcaagcaaaatgccatgtatatattgccctaacaacactaaatgcctaaaacatctcaaaaaaaaa

SEQ ID NO: 3748 - DNA, 199 bp, Homo sapiens
  misc_feature 20, 21, 38, 79, 83, 105, 119, 120, 128, 131, 134, 137, 141,145, 146, 147, 151, 165, 173: n = A,T,C or G
tatcaacatatagatggatnnctatctgtatgaacacnacaactttacttgacgacttgaggctgatggtggttatgcnaacnaaaccactgtggttaatatgtnaaactgtttgatannactggtcngcnggnaanattnatannnaaanccgggccaataagntgtctttnagattaagtgggaaaaaagacttttt

SEQ ID NO: 3749 - DNA, 123 bp, Homo sapiens
  misc_feature 19, 46, 53, 54, 68, 72, 83, 84, 97, 100, 102: n = A,T,C or G
taacgaatgtttcattgtncgaggcaagcgctaattataaaacagnatagggnntgggtgccatattntggngttggaacaannaacatacttttanttngnacgactttggaggggtcgatg

SEQ ID NO: 3750 - DNA, 218 bp, Homo sapiens
atatgaggtttaagaccagaaagactgactccagagcccaggctctcaaccatcataccaactggcctccttttgttgaaggctgaggaccatatggcaagcatgaagacaatatgattggcaccttggttctgtttgaatcgtcctcatattacaaatctccactctgatttactttgtgtattattaaacacgcaccatatattgttaaaaaaaaa

SEQ ID NO: 3751 - DNA, 337 bp, Homo sapiens
tcttaatgaatgcttcaccttgtgttccacttacatcaaggattgatccttcaactgggtaaaaacccttcccaatcttaaggaatgtatataatttttatttttgccataactgtagccttgaaaattgtttcttcatgcatggaaatgaccttcaagtgtggcagtctttggagattgagggtggacactcactttgaactaagacttatctaagcctctaaatcatggaatgaggagagaaatgcacctagtcttctgagaggcttaagtcatctttggataatgttagtaagttgtcctttcttgactataataaattttcgtatttggctca

SEQ ID NO: 3752 - DNA, 468 bp, Homo sapiens
  misc_feature 220, 234, 247, 391, 402, 412, 427: n = A,T,C or G
gctggaccaggccctgcagctggagatggaagatggtgtttccttgagaagattaccataaagaagagagacgagagtcatcactacagcacaggtgaacacaatcgaccagccaaggtgattcacacacttcagcttgaagctgatctgccacttgtgtcttcttgtctctattgaattaagttcctgagacctaatccttcccatcactagtatcggngcttttatttttgntttctacttaagntggataacataagtgaaggaaaatgtgctaatataatagaaataattgcattaataaagcctggtaaacaggcagaaacagtgggagccatggccagaagcaagctgctggcagccaggcagtaccaccatccaaaagctcacnaaattattttnagaaaatgcntccgggctgggcatngggggctcatgcctggaatcccaccctttgggaggcctaaa

SEQ ID NO: 3753 - DNA, 338 bp, Homo sapiens
gactgttgtgcttcccaacaggactgagacagcccggcagggatcagagctggactaagtctgcagggccccagacaagctccagcctcccctttctggcctgtcatgactttggacagagctccagaccttcccaggctcagtcttcaccaactcgggttccttgatttgccagttacctccctggcccattttccaggccactaacctctctggcttggagtgaagaaggatctgactctgctgcgcccatctccctccacacccaggtcccaaataaccaggccacacaccaagtttcaaggatctggctcttcctttcactctctcaaaaaaaa

SEQ ID NO: 3754 - DNA, 125 bp, Homo sapiens
  misc_feature 18, 58, 60, 61, 62, 66, 71, 75, 94, 99, 102, 104: n = A,T,C or G
tataattgaaggtgccancggctttatatcaaccctacgggatctgttaactaatctngnnntgtnacacntacnatctttaaacttccacaanctttnaangnaacatgggtggttaatgccaa

SEQ ID NO: 3755 - DNA, 189 bp, Homo sapiens
  misc_feature 32, 36, 57, 58, 72, 81, 92, 96, 102, 109, 115, 123, 136,141, 160, 161: n = A,T,C or G
ggcctcgctggccattccacatgttaaaatantcgnaggaggcatgttcggcacacnnttggacccgaacgnggggtaagngcactagggtncggntaaacngatcttncattgntgaggcancgcttattatcancatanagattggtatctatcttgnntgaacaccaaatctttacttgacaactt

SEQ ID NO: 3756 - DNA, 189 bp, Homo sapiens
  misc_feature 42, 75, 80, 146: n = A,T,C or G
gttcccctaacaagcccttaaccaaacccttcctttttcccntttggcagggagaacaaaaaaccaagaactggncaaangcctggaaagaactcaaaacatttaaatcaaaactggcggcttcccgggaaccaaaccttttcccntcggcattaataaaatacatttggcgggcccctcaaaaaaaaa

SEQ ID NO: 3757 - DNA, 467 bp, Homo sapiens
  misc_feature 22, 343, 428: n = A,T,C or G
gcgctgggagctcctgcttagntccagctgagatggcaaaatttgccattgctccaaagatacagcttttctacacttcctggcaatcaatggaaatcaggatttgagccatgttgtgcaataaagtctccgaacatatttggcaaattagtattcctcgtctgcacttgcagcttatgaagattttgagcacagctttaagacagctctgaagttgggaagaactctggggtgcttttacctcatgggcaagccacactgcctccactccaccttggaatcttgcttccttagccatctgaacacaagttctttggttcagccagagccgggatcaggcccngagggtggctggtgacactgaagatgggaatattttccacaaagcttgagaagtgatgaagggcttcttggctcaaagaaaatgnatggtcacattaaaaaatcaaacttttcccgaaaaaaaa

SEQ ID NO: 3758 - DNA, 122 bp, Homo sapiens
aagctgtttatggaaagaatgactcagcaggaaacgcagatgagaaaccacaggaaatctgaactgggcttttgactggagctggttaaataaaagccattatgttttactttaaaaaaaaa

SEQ ID NO: 3759 - DNA, 226 bp, Homo sapiens
gtttctggaactgaaataataacatcatgtcttgttattggaacaatatatcaaaagacaagcaaatataaagctaattctctgtggaatgatactttcaagttggaatttatgttacattaacctattgtttgagaggttatatatgatgatatttttgccttaaatattatttgactagtgtgggtttaccaagctaactatgccaataaagaaattctggaat

SEQ ID NO: 3760 - DNA, 209 bp, Homo sapiens
  misc_feature 35, 43, 48, 51, 53, 63, 64, 75, 78, 85, 107, 122, 123, 129,135, 137, 158, 159, 173: n = A,T,C or G
tatgagtttaaaagccaagaacatcaagaagaagnaagggagnattanggngnttgggtaaannaccatttcctnagnggagacnttcgtgatgctgccaggaaganttaccaccttttttnngccttnaccagncngaatttgtttaaagggggggnncttattaagaaatngaagttcctgattggaaaataaaacgccccccggag

SEQ ID NO: 3761 - DNA, 460 bp, Homo sapiens
  misc_feature 381, 444: n = A,T,C or G
aggaccaaccagaggcaggaaggaaagagaagctctgagaaagcatgtgacctgctcaggatcccacagcatgtccgtggcagaaccctgctccacattcaggctgtctgcatgaggcctgtttgggttctcagcacacccagtgcccgattcccccaggactgaagcacctgcctctcgacagaactgtctcccactcgctctgcagctgtggatgccagggaccgcaggcagttggcatctgctctttgaaaaggtatttatctttccactcactgagagcaagcgagagccatataaggacatgcccaacgtcaggtgcacaagcgttgcagagacagatgtcattcatacgcagtgaccagacttggccgttactgncaggacacccaccttcactcccccaagagcatgacgggtacactggttgagcaaggagctctnagctgggccccagggg

SEQ ID NO: 3762 - DNA, 230 bp, Homo sapiens
  misc_feature 20, 37, 53, 173: n = A,T,C or G
gtacgttcagacaagcccgntggaggatgagagactntgtgaagcaaagaaanttccaactgaggccaacctagaccagccagctcccagctgacctggaaactgcctgtgtatgcatgagtgaccccagccacccagccaagaacaagaagaccgccccgttgaggtctagncccaaccaatgatccacaagaatcatggagataaataaacaggttggtattttaagc

SEQ ID NO: 3763 - DNA, 106 bp, Homo sapiens
  misc_feature 22, 58, 63, 87, 89: n = A,T,C or G
atctcccttttttgaagacaangattcaagccttgctttaaagattccaaagcttganatttntgcctctgacttgatccattctananatgtactccctcctctt

SEQ ID NO: 3764 - DNA, 326 bp, Homo sapiens
  misc_feature 16, 40, 177, 198, 267, 309: n = A,T,C or G
aatgagaaaagtcctntgtgttcaggaacccgcagcaagntgaacacagcctggagaaatgcttgcccacgtgtcatgacggagcccagaatccaaggaaaggtgccagatgtgtttgttgaaggagaaagggaggctcttccatatttccttccattccttgtgcaattttgaagncatcaagaccttggcacctangagagagaggtacttgaaccacgtatgcctcttccttccttttattggaggcaccctgccagggaaacntgaaccttcgaattatttttctgtctaatcaagcttttcttntataatctcaagccttc

SEQ ID NO: 3765 - DNA, 384 bp, Homo sapiens
  misc_feature 66, 233, 237, 240, 245: n = A,T,C or G
ccattcatctccaagctgcttccactcagctctgtcatgggtgaatgtgattgatcatctcagctnttgtactcaagagaaaggagaaagaattaaaccatatggcaggagtacaactagacatccagggtgaggagtgctttgtggctggcgggaattcaaacaattatcccaagccaaatgaaaaatgaatgcgtgagaccatgatccatattgagtaagtagaacttggnactnggntgaanctcctgctgcttttcagtctgctgtctctgctgccccatggctctggtcctggccctgggcttctctcttctacactgtacccaatgcacagcttttgtcattgattaaatgccgcaactcgcccgggaggcatttatt

SEQ ID NO: 3766 - DNA, 109 bp, Homo sapiens
  misc_feature 81: n = A,T,C or G
aacaaataacaaagaaggaggaggagaatcaatatggattggttcacaggacccacagcagagggacagctgggtctttgngtgaagagctaaacagtggcgatgcctg

SEQ ID NO: 3767 - DNA, 255 bp, Homo sapiens
  misc_feature 67, 104, 108, 154: n = A,T,C or G
aaaacccagctgagataaacctctacttgcaaagggaatttgaaaaagatgagaagccacgtgacangtgctatcttgacgcatggaaaggcctgaaaacttanattntcatcaaaacttcagcacctaaccccttcggagccacattgggctncagggccttcagataacaatatttccccttcttcccacatgcctttgtgaagaatgagaataaagaatttctgccgaaaaaaaaattttaaaaaaggggcc

SEQ ID NO: 3768 - DNA, 311 bp, Homo sapiens
gaaccagagccagcgactcgtgaactatgacttggggcgacgccttccgcctggctggtttgcatctctgcggccagtttacgagatttccaccacgaccagctgaaaacactcctgtccgaccactgccttccccaccgccaccatgcggtctcagcactcgtgaaagttggtgagaaattgagcccatatgccttcggattgtttgcaaaccctggcaaggctctggaagtccaggccaatttctggattaaattagaaatgaaaagaggaaaaatatctgaatcctggcatagagagaaatcattcat

SEQ ID NO: 3769 - DNA, 115 bp, Homo sapiens
ggacaccaccagagatgaactgggataaagcaggagaggagacagagagtgtcagaccacattccaccaagcattgctgtgattcaacctggggaagctgattggaaaaaaaaga

SEQ ID NO: 3770 - DNA, 234 bp, Homo sapiens
  misc_feature 215: n = A,T,C or G
atttagcctcccagcggaacatggcaaacacaagacatcaacctctacagttcttcgcaggtctcaaactctggggtggagacctgttgggcaaaggttggtttgcagatgcttccacaaaccatgagctcatgggcagggtctgtgccctttcggctttatatgcaaaccacccagcgcaatgtttggcaaactgcttgaactaataaactaanccacaaagccaaaaaaaaa

SEQ ID NO: 3771 - DNA, 102 bp, Homo sapiens
  misc_feature 19, 27: n = A,T,C or G
gccctcagcgactttgtanagcagagnctcacctccaggctggaaacatcctggactattacatgaacaagaaataaacttcactgtgctgctacaaaaaaa

SEQ ID NO: 3772 - DNA, 106 bp, Homo sapiens
  misc_feature 85: n = A,T,C or G
gtaacattgtcatggctcctggcacctctgggatctagctgaagaagtgtgagttttggcattaatgagatatattttatgcggntctaagctgcgacattcacag

SEQ ID NO: 3773 - DNA, 106 bp, Homo sapiens
  misc_feature 19, 22, 37: n = A,T,C or G
cccaggaattcccccttgnttnttgaccaatcagcantccccacattttagccctacctgttcagaccctttacaagctccatccccaaaccctggagggaggggg

SEQ ID NO: 3774 - DNA, 276 bp, Homo sapiens
atgaggaaaccgagaggtgaagtccctcattcaaggtcacacaagccagggagtgggcagtgctcaaacgcaaacccaagtctggctgaccccagagcccatgccggatgcagcctctgaagactcctggcagctccaatcacccacagccattcccaggagttgagagctgacttgccgccaggattcccatcgtcacgacaactcttcctggcagggaccaccgtccccatattactgtggtcaaatagaaaagggctcagatccctgcctgca

SEQ ID NO: 3775 - DNA, 391 bp, Homo sapiens
ggcgacctctctgggttggtgaaagtactggatgcatccttttcacccacatttcttagtgtctcttctgtgccagacccatgagacatcaccctgagcagtggtctcctgaaagatgactgtgcaaagaaacaatcacagaaataatgcagcaaatgaaaggcttattctaggaggggaaaggggattcctgtgacgggcgactggtgagggccctttcaatgacgacgccatcttcaaacagacacagagcgagccgtaagcacagcaggcaacatcacggggatgccgagcttttaatgacgccttgtgttgcacagtgcgtgtgccacgagctatgacatctgcatttttgggccctccttggtgggagggggacccatgggtgggc

SEQ ID NO: 3776 - DNA, 405 bp, Homo sapiens
  misc_feature 366: n = A,T,C or G
gtgtcctgctcagcttgcagaaacccatgggacaaagtgaggaattcccttcaaatcaggagcacggctgccaagaaggcactatgggcaggggttggctgctgagatcatgagagaggggagtctttgggtccttccttgcaggcttggtgattcctactgtaaaggaccctctcctatttgtcagcaaaagtccttcagcccagtcagagaaaccaccagacctgccccatgcccaacatcatcagcaaagaatcaaggagacagtaatgtgaccagctaattcctgacaaagggacaacagatgcaaagggtttaatatttttaacatctaagaatggtttgcatcatgacaggacacttttnggtgcctaaccgattataaagaaatgcaattttaaaact

SEQ ID NO: 3777 - DNA, 316 bp, Homo sapiens
  misc_feature 17, 18, 33, 50, 55, 63, 76, 95, 105, 106, 118, 119, 143,161, 165, 177, 188, 195, 206, 217, 224, 252, 285, 300: n = A,T,C or G
ggtggcgcatgaatggnnctgggcagatgcttntcaagagtttcaaaccnatgcncgaaaagnaagggccaaacgnccagggtgctttatttatncccggggctnncaaagtcatcgnnccgggtttttcacttgtggatggntgaaagcattggttaccnttgngcgaaattttgnaaatcatttgntggaccncccgaggctgnggaaaaattgngtggggnaacctcacaaggcaggcttaaaaaaggngtggggggggatcaagcccccaaaatttgacgngccaactcaaaagancctgggaaaaatgggg

SEQ ID NO: 3778 - DNA, 183 bp, Homo sapiens
  misc_feature 22, 28, 91, 109, 127, 130, 135, 140, 142, 144, 146, 147,150, 157: n = A,T,C or G
agctcccagcttaagatgaagntgaggnacaccgccagagatgaactgggataaagcaggagaggagacagagagtgtcagaccacattcnaccaagcattgctgctgngctcaactgtcccaggcngangggcntgttnancntnnggncttaacntgggtttgaccctcctcttatacgtg

SEQ ID NO: 3779 - DNA, 101 bp, Homo sapiens
ccactattaaagaagagagaaagaaggaaacttctgcagctatttgatctgctcaacatccaagaaccgatctggcattggattttatgggctttattttg

SEQ ID NO: 3780 - DNA, 431 bp, Homo sapiens
  misc_feature 409: n = A,T,C or G
aaacaagtgttaatggcgacatttaacgacatggagctccctgagttgactctgcctccgcttgccccctgggcctgtcatccatgctgcatcgtggcagggtcccactcagcagcagccctgactggcgtggctcctgggacagcccaaacgtactcagccaccacttggccggctccagccacctgcccccaggactgaaggttatgcagatacacagacctggtccatcctcttctaccctcccccaggtctcccctttccaaccccagctcataaagtcctaggttcctgtttcttactgtgattagcaagcatatcattgtcattagtggcctcacccagaggcctcatgtcaagggaaatggcgactgtgctcaaataagtgggttgacgcataataaatggnctataaatatatggcaaaaaat

SEQ ID NO: 3781 - DNA, 150 bp, Homo sapiens
  misc_feature 93, 100, 107, 110, 114, 117, 127, 130: n = A,T,C or G
cgatgacacaagcgacatcttggaagaggcaaaacttgagacaggtcttcaaggattggtgccatctggacaggttgaagaggagtaggaggnctttcgnttgttgntgnttgnctncactcccgcncgntgcaccacttcttgcctgtt

SEQ ID NO: 3782 - DNA, 325 bp, Homo sapiens
gggcccaggagagactaaaagctatgaaggaatttgatgtggggaaccccaacagagccaagaaggtacccagagactttagaaactatagggacttacttctcaggacccctttgaaacctagacctaagaggatgatttgatgctgagacagcatgacatgcagagtgactcaatccaacagaatgctaagtctcagtgagctgtcaccccattctgcaccagatgaataactctgcaacactcagatgattgtgacctcctcctgccgtgcctgcccacatgtcaccagtagaagcaagaatgaacatttgtgaaaaaaaaa

SEQ ID NO: 3783 - DNA, 110 bp, Homo sapiens
gggacaagcaaagaagagagtggaggaatctgcactttttctccctaagcagtcttgggaaaacagatttccaagtgctaaagtgtatggtagtggattctaagaggcgt

SEQ ID NO: 3784 - DNA, 376 bp, Homo sapiens
  misc_feature 289, 294, 351: n = A,T,C or G
gatgaataatctgatatcatgtgaaatgaggaaataagaagctttctgctgacttcattttgacccagggtccaaaaggtgatgtaatcctgtggcaagaagattcaaaactgtggactatcttgcaaaaaatacaagaagatattgaaagttttcatgagtgcctaccacctaatctcaaacactatcattcatatgtgcctcattgagcaaatctttaatgagggatctatatgccaggtattgtgctaagctcttgtgcttaagtggtgggcaaaagaaaaccagnatatnggcctttgagggtttctggctcttcaccaaagccttataagcctcctaatttggggnattggggaaattctcttaaagcctc

SEQ ID NO: 3785 - DNA, 178 bp, Homo sapiens
  misc_feature 27, 39, 40, 42, 45, 58, 66, 73, 78, 79, 84, 102, 135: n = A,T,C or G
ccgaatgctatacatgctctcgctccncaaggcccattnngnacnctgcaagaggccnaaagcccngaacacnggctnnagtcnatcctcaggtcttgtgcntcctgatccgggctctggcttactacgcatggngggttatgtatggagaaggtcttcacggtgccctgagaggcaa

SEQ ID NO: 3786 - DNA, 578 bp, Homo sapiens
  misc_feature 22, 66, 168, 223, 261, 272, 362, 375, 398, 401, 452, 485,500, 506, 544, 551, 559: n = A,T,C or G
ggggagctaccggattaagtanaactgaggggctggtgggctgcgataattttataccatcctagnctcctatttctgacctcaaggaaactgctattcttaaaaatgcagcgctgttctgtacgctaaaacgtggcacagaacccaacctttacttaaagttcctgnggaagaaatagagttcccgcctgcattacccagataaatctccagtttgccttanaagagacttaagcactttcccaccttcacactccctgntgctccaaggnggggccaggcagtggacaagaacagagctccaatgagctccgagtaaaggatgagtcaagatttggggctcctgttttgggttaatccangatacctcctggncctaggttccccaagttgccttnttntatagctgcatttctttttcccgttatcaccactcgcctatgttcaaatgngaatgaaaatatttaaatattaaaagacatacnctttacaaaccgatnaacagngccaaccactggagctcatcagggaaatcatttccctntgttggnggcaattncccaaaaattggggccaaa

SEQ ID NO: 3787 - DNA, 422 bp, Homo sapiens
  misc_feature 21, 31, 34, 41, 44, 48, 78, 79, 81, 96, 98, 104, 129, 132,141, 158, 163, 164, 168, 198, 231, 233, 265, 277, 286, 296,305, 312, 318, 324, 336, 340, 342, 345, 363, 386, 398, 404: n = A,T,C or G
agaagcccatttaaatgggcntcggccgagnatngcgaaantcnttgngacgggcgctgccattttaaattgggcccnngnggaggggaccaaagncnagcctngggggcgttaaaaccaaggctgganccnggcctccanaaaagggtgggggggantacgnnaaanccctttttgaggccaagggttcaagccctngggtttaaaagtccaaagcttggaatttgggcncntcggctttgggcccattttaaaaaatggggcngcggccccttcnaaggggaantttcggggantccgggggngccgccntttttnaaaaanggggcccggctntttngngcncaaatttttttttggggnttttttttaaaccccggggggangagaaaaaaatncttttntaaaaagccccccctttg

SEQ ID NO: 3788 - DNA, 107 bp, Homo sapiens
  misc_feature 26, 40, 42, 50, 55, 64, 74, 79, 89: n = A,T,C or G
ttcttcccacatgcctttgggaaggnacgataatcaaagntntctgcctntgggngactccccngcctgcagtnatggnctacaccgcngatggggttcatcccttt

SEQ ID NO: 3789 - DNA, 417 bp, Homo sapiens
tttgataccacaatgtaccctgaatgtgaggtgctatggggaatatgaagatgaaagagaccctgccactgctttccaggagttcaccatctggtatgggagaccaacatccacctaactaggtattatcccagaggtcctgaagtggaaccattaaagaaagggtacctgccactccatatcatctcacttcaagaacttgcatagaacatctcagtttctgcttttataaaaaacatttctgcgttctacagagccaagacacaatctaccatggccctcctgggtttgaagatgacaagcacatttctttattcatgtgtactcaattgcctttcaacaatctgctggactgcatacttggtggtcaggtaccttggcacttcacagtaaaggctgcttcactttaaaaaaaaa

SEQ ID NO: 3790 - DNA, 161 bp, Homo sapiens
  misc_feature 132, 136: n = A,T,C or G
acactgccctgctccaggcttggagcctgccaccagggtcaagttcgtctctggcctgttcagactcacggagaagaaagtagagagcagccagggctgcaggaagtggagttcatgtttaccggggacagntcantgtgagaagacaaagttctggtgac

SEQ ID NO: 3791 - DNA, 258 bp, Homo sapiens
  misc_feature 99, 100, 102, 104: n = A,T,C or G
agttgagggagctaaagccacctccagcccctgtgggatggatgctctgctgaaattcctgagcagcacagccagccccagaagttctaactctcgagnnangnggggtaatggatggcaagaacagaaatgaagactctgctgcagtgctaaggacaccttttaactgtgtcacatttgccaaactttgccttaaatgtatcacggtaactgatagttttgacggaaaaataaagatccctgatatggcaaaaaaaa

SEQ ID NO: 3792 - DNA, 266 bp, Homo sapiens
ctccctatgcaccttgaggagaatcatgctgctctgtgatgggcaggagtgggagctttgcatttctgaaggtgtgcaccctgactggagactgagggagtctctgaaaatgagagaaagaacagagtcactggggtgcccttgaagtatgatcatctggaccttgctttccaacagcacgaacaatgagggcagctgaggggctgaaagtggcactggggtagaaataactaaacattaaagtctgtgaccttgaaaaaaaaaag

SEQ ID NO: 3793 - DNA, 430 bp, Homo sapiens
  misc_feature 387: n = A,T,C or G
ggaaacttccaacttcctctccctctggcttcacaactacagagaccaccttccatacccttagactcaagttttctgtttaacaacctgcttctgttatcacaggaaaagatgctcctttaagtcatcattccttggatccaaggttgctacacatacatttcttctagaaactcagaaaaaaagagaagagagtggagaacatgaggaggcctcagaaaaaagaagagtggagaacatgaggaggcctcaagttcaatgtgaaaatgcagtcaggaaaaggattctctagcagcctcctctttgtcatccccaactcttcataataagccacccatccatggtaacaaggttttctttcaaatgctcttaattgaaatttgcggncaactggttcttaataaaggacagctttaacttcaaaaaaaaa

SEQ ID NO: 3794 - DNA, 259 bp, Homo sapiens
  misc_feature 22, 27, 38, 43, 49, 54, 60, 96, 98, 140, 163, 183, 185, 196,211, 220, 224: n = A,T,C or G
tgcatataacaccacatgtgtncatgngtgcacacacnctgtnctgcantattnttgctnacgacactgtccaatccaaggaccccacaggttggngnaccctctaacttgctgctccactttttgctttgatgctaacnaggataacactactagtggcaancctatgctggaagctgccangncctttatctgnaggatccttactgancctgccagnttgngatgattctccacccctgacagatgatgatactga

SEQ ID NO: 3795 - DNA, 511 bp, Homo sapiens
  misc_feature 480: n = A,T,C or G
ctccatttgtacacagatcaacgtgaggaaggccagggagaaggaatttggcactaacgcccttgaatgagcccagtggccagcagctgcacccagagtccctctgacaagaaagacaacaagctgtgacttgtggtcagcttgaggacacctgaccttcaccaccacagttgcccagcatgaacccctctggacacacagagctgcaggtctctgtaaggagatacagttggaacctggatactccagccggggctttggagtcatctggaatgctcaccggtgccctgtattcactatctccacgtgggacccagttcagagaggctggtctttccctacccattggcttgctgcttgactctgaaagtagcatgattagcccaggtcacaggtgccacctcccagagatcctgagccaacacgctgtgcatcctgtccccccaacttagccctaatctgcactcctgtgcccactgngaaactggaatcaacggcttgggaagtgccg

SEQ ID NO: 3796 - DNA, 271 bp, Homo sapiens
gatggagccaccaaatatcccagtgtctgaggtggatctcaaaccaagaagtgtgacttatctcatgcaccagagaagttcctcaagaaaagaagcatgtcattagtaattgctgcattgcacatttggagaggaaatagcattctccagccaacaggcctggtgtgctttgcttcctgctgtctcttctacatctaaaatgatgcttcgtacatagcatggcacaagttggcactcaataaaggcttcttgcatggaagaaggaaaaaaa

SEQ ID NO: 3797 - DNA, 604 bp, Homo sapiens
  misc_feature 17, 21, 35, 54, 74, 75, 77, 83, 89, 108, 115, 116, 118, 122,123, 131, 156, 160, 163, 168, 200, 202, 203, 223, 224, 230,246, 253, 262, 263, 280, 281, 282, 306, 309, 311, 317, 325,330, 337, 361, 378, 401, 409, 425, 428, 429, 437: n = A,T,C or G
  misc_feature 450, 451, 456, 469, 478, 517, 537: n = A,T,C or G
ggggaagctacctggcnttanagtcagaaactggnagggcaggcttggtttcanacatggaacccttcgtggtnnanatttcntttttnttcaggaccaaagaagccnttgtttnngngccnnggacaaantaaaatctttttcttttttgcctgngtcnctnggagnggttaacacccttgtgtcccttttcgggaagncnnccgccctcataggattgctnnaggggnccttcctggggcttgntgcgggncgcttgttnncagggaagtccccaagnnnattgccttgggggacttgttcttnagngnttcctnattagggnggatnattccgnccatttgaaaataagctggcaggncatcttgggggggattntttcccaccaagggatggagggngggattanaaaggaaagttcccanggnnggtttttncaaaagggccacnnttccnccaaaagcttganaaaaccaangggattggaagccccaagccgggggaaaaaccgcttggnaaagcccatccacttatgcngtttggaacttggcttgtgggttttgggcttggggggccgttggggaaaacaagttttattctcaag

SEQ ID NO: 3798 - DNA, 494 bp, Homo sapiens
ctctaagagactctgcgaagagacacattgctttggaggaatcagccccaggccaaagcaacaagcaacaccagagtcctgcggagagctgagaagcaactcgcccactcagacatagacacacagatggacaaactgggatgcagtcctggatctaaacaactctgcaacctgcttcctggggacattcacgcccttgccacagttgcaggaagctggatcgggcgtttggggctggtgagggaaatacagcagcctggaaatgtcaatcagtgtttttctcagactttaaggcactgggaagtggggccagggaggcgtccactgtttctctagttgcctcagccacagcacctacattaaggaggctgcaaaactggtttcaatctgacgtggaaaagatgtctttcagcaattggtgattatatgaattgccactcccttcgatggaagctgccttggaaataaaggcagttgccctagtgaaaaaaaaa

SEQ ID NO: 3799 - DNA, 311 bp, Homo sapiens
ggtctttcttaagtcattttccaggggagaagccagctgccctctcttgacatagccatgtgaagatgctcaagtactgaagatcctaagcctgccaacaaacatgaaatatttatttgggggaaggctgtcaagaaggatggcattgaaactgctgggaaatgtaaatttggagcagatctggaatctgctgcaagtgtgaacaccctcagatgtttttgactggtgtttggagaagtgaccagtttctcaccagccaactgaagaacagatttaataaaatctggattctccatatcttcaaaaaaaaa

SEQ ID NO: 3800 - DNA, 327 bp, Homo sapiens
  misc_feature 16, 19, 76, 82, 100, 122, 123, 126, 132, 136, 137, 148, 153,162, 176, 180, 185, 188, 193, 204, 211, 214, 228, 234, 241,249, 256, 272, 274: n = A,T,C or G
ggtctccagatgccanaangattaaacaaatgccagcttcacaaggccatgcttttccagcagaagaagagatgcnctgtanacaaagaacttgtaggtnccaataaaattttggaacaganngangacccnactnnggatttacggntgacngaatgggangagaaagaaaaacntctnattcngtncaccngccaggctaanaggctgnttntaaaaaattgaccnctttgnttcctgnttcggggngtccatngacaaatgccttctgncngaactaacaaatatttattaatgctgaggtggaactcgagaaaatgggtggga

SEQ ID NO: 3801 - DNA, 121 bp, Homo sapiens
  misc_feature 64, 68, 73, 74, 80, 85, 98: n = A,T,C or G
aagccgacaggttcagctcgattgagacctctgctacaaccacctccctggtactccctgggcnatanaactnnaggttnctttntttgagccccatntacatgctcacatctgagtaccg

SEQ ID NO: 3802 - DNA, 267 bp, Homo sapiens
gttccattatatggttgggctctcctggaaggttgctgaagaaagagggacttctgagaggcagtgcagttgagcaggaaataacggtgctacatctctggacacggtgaacatttcaaggacctcgggtctaggcagtccagttaaagtatctaacaaatctcctcataaaaaacaatcaagccaaatagttaaaatctgacctcaattctcttttctggaattagtgtcattaaaatgattttcaaagtctaatattaaaaaaaa

SEQ ID NO: 3803 - DNA, 427 bp, Homo sapiens
  misc_feature 383, 397: n = A,T,C or G
aggaaactgagatgccaaatgattaaataaattctccagggtcatcccacctagtaagtgaagatgctggactcacaagtcaggctgttggcaacaaagattaccctacgctccaaaaggagagaggcacagacccggatgagatgacacacactcaggcacttaaagagacatttaaaatcaacatgttccaatcgggaatctagtggtcggcagagttcaatggactgaaatgcaagaagttgaatcagccccagggaggtaactcttaactgtgatggtgcgtccaggagctgggaaaggagcttccatgacacttcgcatgaatgggtaaacaagggctggagacatttctcttctcttctctacttcaacccaaaatntatatacccaaagngttattttattatggactaagttaaaaaat

SEQ ID NO: 3804 - DNA, 386 bp, Homo sapiens
  misc_feature 335, 347, 368: n = A,T,C or G
gtggggtctttcaagggccctagaagacacttccagtaattgtgatccaaagtagcagttcaagagtggagacgcacgcaatggaatcacacatgctgcatttgccaacaagccaaggtccaggcaagaacaactctcaattaaagagtgctctgtcctaaagaaatgctacgagatatcggctcacagagaaaagtctcaaatttttaatgcagtctaatcaaatttagccaggtcccttcctgaatttacaagtccaccttctctttttgcagcactataaacagtgtactatctactgatagatcagaagcagtcctaaaggccagttctgnattcataacccngggaaattaaattaaaggccnctttgtctactggaaaat

SEQ ID NO: 3805 - DNA, 459 bp, Homo sapiens
  misc_feature 269, 270, 272, 288, 294, 297, 299, 301, 318, 325, 356, 392,404, 426, 433, 441: n = A,T,C or G
gatcaacacacccagctaaaacagctcaacttcctcatcacacaacacagttctggccagttagacacacgtccccggaaagggcatctccaggagaataaaaaggccaagccactttttgaagaaagtctttgtccctaccccctttttctacctggaagtcagactcaggcctggagtgtagcggccgccttggtacctggaagcaacaatcatggccgggagaccttacacctggcatggtagagcagacggaggaggggccgccnngngaataacctgggctanagcccnaancngntaccccttaaattctgnatttcangggactgctgtaacttggaacggggaaaagngaaactacagaaaaggggagggaccactggacgggntgcttttcattntattgccccactttttaaaagnggcattnctacaatnaagcaccccttaataatg

SEQ ID NO: 3806 - DNA, 333 bp, Homo sapiens
gttttgtctccttgaaagcacatctccatgaaaaaccctgacaatcacacaaaaaaaggaactacgcttcatggagggagaaaagccacggggagatttctcattagtcacctgcatgaatcctcttgaagcttccagcacagcccagctaccagctgaatgcaacagagtaaatgaccccagttgaagccacataaagcagaagcattgcccaaaggagcgccatctgaattttacactcatgcattttagccaaatgaaatgaaatgatgattggttttttagccccttattttgttaagcagcaatagatcgttgaaatgaagaaaaaaa

SEQ ID NO: 3807 - DNA, 511 bp, Homo sapiens
  misc_feature 486: n = A,T,C or G
caaacccggcgccgtcctttcgggaagccgcgatggcaaacgtcgccctgggccttcggaggatcaagaaaaaacgtcggcgagaaagggctggacgcaaggctgggggcgattttcgggatctctctctgcccctggcaagctctctcccgcctgaaagccgccgacccgcccgtcgggcaaactgtcctgattccttccgccgcgttttggtaaaccacttggcggtaactttcttgacattcctacgacatggagacaaatgcaaggcgcgcccgactgggtgcttgggtcttgcagcagaggcacttcagaatatagttgggtcgctttgcttttgtttccaaaaagcaaaattctattctcatttaatttccttgtctggaggcaaaatgctctggcttcacacaattggtccaacgttagaatttttatacagaggtaaaaatctctcgagactttcattaaataccttaatacactttncccagaataataaaagtaaaattat

SEQ ID NO: 3808 - DNA, 254 bp, Homo sapiens
catcctcggggaaatggcctcatccatgtgttctgtacctattgcatttttagggaagtgagagaagttgcaagaatgggaacctgtcctagaccaagtggttcctgggaattttcctaacctggcttggctttgttctgcattctactgcataatcaccagaatatttttaccctagagtgtggtgggggggaaggccttgttagggattaatttatttaaatgtataataaataattaatgagcaaaaaaaa

SEQ ID NO: 3809 - DNA, 137 bp, Homo sapiens
agaccctttctttaaaaatggggaattctgactgggcccgctcttcaatccttctaaagaccaagacaaagaaactctcaggaaaaaattaaatttcaaatggttaaaaaggtaaataaacaatcgaaagacaaaaa

SEQ ID NO: 3810 - DNA, 382 bp, Homo sapiens
ctttttgcttttccaaggacactgctgatccatcctagaagaagctgacagccaccaccttgacactggcttattgctgtccaggttatttaagatgcggaggaaatcttatcacagagaagcagcttctaaacatgtcctgccagggctcctatagacccataggcggctagagtgtacctgtgagcctctggggagatgtctcaccgccagagagctgtccccaactcaggacctcacctgcctgtgcgtgcgaaattacacctgagatggagtggctgtgtccagctaacaaagccgtttggggaggggatttcaagcatgggtattccttgttcactttaataaaacatggcatgaattcaggcaaaaaaaaaagggc

SEQ ID NO: 3811 - DNA, 477 bp, Homo sapiens
  misc_feature 408, 431: n = A,T,C or G
gtgtgacaagggctgcagctgcccccaggcccgccccaccaccatctccttccctcccagggagcccaggcagcctccatctccttctttgcactgccctgtgctgtcttgcagccaccctttcagccctgtgtccttcctgcagcccctaccctgctgtccacttctccggaagccctcttcaccctagccttgggacctgctcactcctcctccagccctgcactcctgcttggagccctgggataccagagagatgcaagctgagctgtgtcttcagaagagtggaaagaaggggagagcagggagaaagagcctctccacccagaagctgcagggaggcgaggagggcaaaaccccgctcaacctgagtcgctgacactaaagatggtcctgacataccaaggncttccgtcaagtcttaagtgaanaaacgaaatgaaccggcatgcctgaaaagtaaagatactcacacag

SEQ ID NO: 3812 - DNA, 481 bp, Homo sapiens
  misc_feature 70, 144, 172, 173, 180, 295, 372, 411, 450, 456, 460: n = A,T,C or G
catttcctactgtgctttaataagtgagtgtttcatacaaaccatgcccatggagcaatatgcacccagncacatggagcaatgctgcacccagtcacatggagcaatgctgcacccagtcgcatggaacgatgctgcacccantcacatggggcaatgctgcacccagttnnatggaangatgctgcacccagtcgcatggaacgatgctgcacccagtcacatggggcgatgctgcacccagtcacatagaacgatgctgtacccaatcgcatggaacgatgcttgcacccantcgcatggaacgatgcttgcaccccagtcgcatggggcgatgcttgacccatcgcatggaacgaatgcttgacccantcgcatggaacgatgcttgcacccaatcccattggaacnatgttgcacccaatcccatggggcgatgcttgcacccantccatngggngatgcttgacccagtccattg

SEQ ID NO: 3813 - DNA, 359 bp, Homo sapiens
  misc_feature 99: n = A,T,C or G
ttactgagcatctcctgacaccagagaggacgcaacaaaaatcacaactcctagaactgcacagtctaaatggcaaccactagcccctgtgacaactgntcacttgaaaaattctttagacgacagccatcaagcagcaaatacctcgcaggaggccattgtgtttctatttgaacttctatggatgtcaagctctgttcttcaaaatttagccctacagatgggtggcccaccggagagaattaatctcactatgcagccaacactaccctttctggatctttccccagtagtgtggattctgctctagtccagaattatgcagaataagtatacttcatcttagacaccaaaaaaaa

SEQ ID NO: 3814 - DNA, 245 bp, Homo sapiens
  misc_feature 21, 39, 55, 56, 82, 91, 97, 99, 102, 145, 152, 157, 170,195, 199, 204: n = A,T,C or G
agtcctggtagcttgatgagncgaggccagaccatgggngcaccacgggccaatnnttgacccttgggaaaaaggcctacanggggcgggnttgaancnttnttttgggaaaagtcttcacctccccccgagggatggcccaagngcccccntttanttggggaagccanatttgggaaaaaaatggaaagggcngganggtcnccaaaactactttaaaaaaattttgtttggaaccaaaaaaa

SEQ ID NO: 3815 - DNA, 194 bp, Homo sapiens
  misc_feature 55, 133, 146, 160, 173: n = A,T,C or G
ggacacagaacttcacagaacttgcaaaatctcctggcctctaaagcactgctgngagaaataatcatctagccattaaggacaaagacttacggcaatttgctaagtaatctttcaaaagattcattccacngggttggccatgngggaaagaccattnaataaatctgaanattcacagggggaaaaaaaaa

SEQ ID NO: 3816 - DNA, 313 bp, Homo sapiens
  misc_feature 32, 55, 83, 101, 116, 120, 143, 152, 163, 165, 184, 195,214, 217, 224, 229, 237, 259, 266, 282, 295: n = A,T,C or G
tcacactggggggctgaaatttaacatccaangggatagtattaaaaaagcgaanctgttttggggggattagggccatgaancgctcctttttatgaaanagttaaggcctttgnaaangaaacttcacacaatattccttnggctcgccntttggcctttngntttgggggaggaacagcanttcctctcttntggaagaatgcaccaatanggnggccgcnttggnaaacccanagcaagcccttcacaaagtaanccaactnggctgatggccttganccttaaacttttnaaacctttttaaatggga

SEQ ID NO: 3817 - DNA, 292 bp, Homo sapiens
attcagtcaaagaagaaaatgaaaaaggacaaaactttcagaaggcagatccaggggctacagagaccaataagcaaaaggagcatctcaaaatcagaattaatcagaatattacaattatcctgttcctgtatcagcccttatgtatcagcgatcacagaaacacatgtatagatggaacctctttcagcccaggtccttgagtcactaagttgaacagagacctccttgctaacctgagttctgaatgtagagtgagcaagaaataaatatttattgtgatcaaaaaaaa

SEQ ID NO: 3818 - DNA, 431 bp, Homo sapiens
  misc_feature 316: n = A,T,C or G
agcctgtggtttattttctcttgtctggacactgttccatgaaccccaggagagaggcatcatcacagaagccttggcatttgtcaaacgatgagcagcgtgaggtgatggagccaggcacccagcagggacccagtagatgctgcatgggctggctggcaggtggccctgatgactttgggagttggggaatctgcactgactgcctgtttgtctcctgtctggggatgaagtgggaggactcttcagtgaaaaagcacagctaactccaaagtcacattttccaaagcagccttgccatttacctgcttttggnttacagaaagaaacaaggcttcatctttgatcctatgttcctcaatgcgttgtagctttttgagtcttatctgaactgatgtccagactgacacattttggggaagagcatcccc

SEQ ID NO: 3819 - DNA, 168 bp, Homo sapiens
  misc_feature 61, 77, 81, 83, 91, 106, 109, 133, 139: n = A,T,C or G
gtgtctctgttaccttgactgcgtctcaacatttcgatctaacatgacacatggccctagncactaggaatgccctnctgntncaaggggnaggatcccataaggnttnggcaggttctcccgtgcgcttttnaagggnatagcccccaactcctgggtgctttttca

SEQ ID NO: 3820 - DNA, 423 bp, Homo sapiens
  misc_feature 296, 313, 325: n = A,T,C or G
ggtggggtctttcaccatgccgctgagcaagtggacagcggggactggagacctccaggtgaggaaggggaacgaagtcaagaaggccacatgtcctggcttccaggcttggtgtcctcagaagcctccagaacgtccatggaacccgcccctgcgcccaccgcctcctgctgtctttccagctgagttccggctgcccctcaccctcggcttcttcactctgcctctccccagccagcgccctgctccccggtcctcaaccaccaccttccacctgcctgggccttcatcgcctncgaacttccctttccanaccaaacctggngtccgttttcctccaggcctgcaccagcacagctgaaggggagagagacccaacctcatccactgggcctcccctcaaccagggccacaacctcaaga

SEQ ID NO: 3821 - DNA, 401 bp, Homo sapiens
  misc_feature 310, 381: n = A,T,C or G
atggctgtttccatgaggctgggaaagatgactacaagtagttccggtttgccagcagttacagccactcattccgggaacagtgcttcttcgtgtgtggaaggggagaaaccacatcgccgatggcaatgccacttccggtgttggaggtatcacacagcacacctgcatatggcttcatctgtggctgtcacactcacgcctgcagggcttacagaacaagtccactacaaatccaattgctaaggatggagagaaacagaaaatgatcattgaaatgcagaaaactgcaagaaaaaaaaccaggatnccctctaaacaacatcgatgatgcaacaataacaaagcttcctgcctaagattggcaggaatttcactttnctgtgcccaacgggagatgg

SEQ ID NO: 3822 - DNA, 472 bp, Homo sapiens
  misc_feature 403, 438: n = A,T,C or G
tatgaacagagaacaacgtcctgccccagctgatgtgagccgtcaatggaagcaaaggggagaaagctgacaatgaagaaagcagagcagtagaaagaatgaaactgggttcttggatgtcaccagttctggatcatcctgatgctgcgactctgcattgcaagacatgctaagcagcagtttttctccaataagattgttgcagttggtgatgacattcccaagtacaccttgtgctgtgattaaggaacagagatatgcaagacttcagttcctgccaatcactctcatagatcacagctgaaaatacctttgtcccaaggcagttgtcagcctgaaaattatcccccaaagcagagaacaagtagtttggataatgacaaaatgattgatcgaggctagngaaatgcatacttggcctttttaaaagaaaatacncgaataaactttctcgctggacaaaatgaagtgc

SEQ ID NO: 3823 - DNA, 144 bp, Homo sapiens
  misc_feature 65, 76, 78, 84, 108, 110, 129: n = A,T,C or G
ggccttttgagcaaggttcaagccttgggttaaggtccaaagcttgaattgggcctcggctggcncatttaaaatngngcggcngccatttaaaaatggggcccgttntngggccaaattcttttgggntttttacccctggga

SEQ ID NO: 3824 - DNA, 405 bp, Homo sapiens
tggcacaactacaagacaggaactaagaagaagtaactgaatgcctactctaggccaggtccttgctaggactgaacatgtgtttgtcgagggtggctaagtctcagctgaggccgaccagcaccaccagacgtcatcccgttgtgacttctacctccacaccagatggcttcttcccacaccagtcaaaccagggtctccctgatctctggcaatggcccggccatgctaagcagaaggaaaaggactggcaatgtgtgtttgggtccctgctgcaggaactagaggctgggaggaaagtttgggcaggcaaatctggatgcatccttggacatattccattaagagcggtgccactcaacctatggcggtaagctgtgatcccagaccaagaggcattactga

SEQ ID NO: 3825 - DNA, 420 bp, Homo sapiens
atgttgccaccctgagtgaagaataaagctgtttatgaaaagaaaatgaaaacaaaagtcagatttctgatgttctcattcaggtgtaattctacttgccgaataagaatacacataggcaaacaaggtcactgcagcccgtgccaagttctaggagaacgtagagggatatgatcatgagaacaagggactggatagtggcacagcactggaagaaggcctgtctgagtcactgagatttatactgaatcctaaagaatgtggaaagaggaagcctttctgactgtaaggggaaaatatcattgtgagcggagcagagaagaatgctcaaagaccctacggcagtcacgcgtttatcacagtaaaatactaaattataagctcattattttcttttacttttcatggagagcctgctcc

SEQ ID NO: 3826 - DNA, 420 bp, Homo sapiens
  misc_feature 292: n = A,T,C or G
caaacagaactttccagaagctcctcccgcagagtcctctatgcaaacactaatgaagccaccaccttgctgagaagacttgccctcgatccctcctgctcacacgatcaatcgtgccttactcacgaagcctcagggctgcatggtgccaagctcgggcactcatctgcctgcctgtcccaggcctgtgggctatgtgtcacctatgctaagaccctgggctcagagagcttccatccgagctggaagcaacactgcagagaagctaaatagcccaccccagcctctggcnggggacccaggaggaagcagtaacggtgaggtgtgcagccacgggggctggtgagggtcaagtttcaggtgaaatcactagacaagaaatatcattcagactgcctagggctgtgttctgaagctaca

SEQ ID NO: 3827 - DNA, 141 bp, Homo sapiens
  misc_feature 30, 32, 60, 70, 88, 93, 115, 126: n = A,T,C or G
cacacggggaagccggaaaacccctcaaananaaggatgactgcatgaaagggggtcacnatgtcctggnggggaccaacaacccttnaactncggtggtatggcttcctaacangaaaacgcccnttgtggtgacaatgg

SEQ ID NO: 3828 - DNA, 149 bp, Homo sapiens
  misc_feature 16, 29, 33, 46, 57, 62, 72, 77, 86, 117, 128: n = A,T,C or G
gggaaaaaactgaggnttggaaacccaangcancctgcccaaaatnacatggttaanaagtngcaaaactanaattnaaactccangtttacctcctggacccaagcttttaacccntgggctttganctaataacatatggagaattt

SEQ ID NO: 3829 - DNA, 402 bp, Homo sapiens
  misc_feature 36, 39, 143, 147, 204, 209, 227, 237, 238, 240, 253, 254,258, 261, 262, 271, 275, 278, 282, 296, 303, 311, 317: n = A,T,C or G
tggctcacaattccatatttcatggaagtgcagggnagnaggtggcccgtcttttaatataactagggctggcggccgcaaatcaggcccttttaaactgctcacagcgcagtggaagccactggcaccaagagcaccctttnatcnttaatatttaaatatatctattggagaacactacaccatttgatatgcatacctcgntgtgnagaagaaagaataatggngccaatgggnngngccatatgccatnnggancgnnaaacctggngctnggncctnagctctagaaaagngttgtgnggtcaaancccaanttttcccaagcaccttgggaaacacttgcattgccaccataaacaagggcccttaataaaaaaatttgggtggaaataaaacacc

SEQ ID NO: 3830 - DNA, 379 bp, Homo sapiens
  misc_feature 23, 26, 31, 33, 35, 36, 44, 45, 46, 49, 51, 54, 67, 68, 71,80, 81, 96, 100, 118, 127, 130, 133, 140, 141, 157, 167,168, 171, 177, 182, 197, 227, 228, 229, 230: n = A,T,C or G
tgctggacttcctgcctgattgngcnagttnantnnggctatgnnntgncnaanttgggcactgctnnccntaaaaatgnngcctgatagtaatangccngcttttgacaatccgatnggcttgtancanggngagtaanncccatcggcccgcccnctctgatatnncgnaacttngctcnttcaaggcctcttgngccttctgaaacacagctcaccctgatgannnntttgcctctcttcccatttcctacacattctgattttcaaaagctccatctagaccagggctaacaaactgtggacagtgggccacatcaggcttctggtctgtttttgtaataaagatgtcctggaaatagtcatattcaaaaaaaaa

SEQ ID NO: 3831 - DNA, 189 bp, Homo sapiens
gtctccaggaagcgtttgctgaatgaatgaaaagactagataacgctgcaagtatccaagacagtagatgattggctgggaattgataaacccctcaacaagttaagaaccatattcctgaagtgactagtattgaaagtaagtgaacacacatcacatagtaaagaaaactaaatacggaaaaaaaaa

SEQ ID NO: 3832 - DNA, 242 bp, Homo sapiens
taaaatgatctgcacccgcccgtcctatggcatgcagtcttcgtacagggtcccgacgtgtgagaaagcacagccactaggaagtgtgttcacggttttgtgggggctgacaggtctggaggcctgggctgggagctggcaacactgttcaggatcacttttctgattctcaccatcctctatcctgatggcctcctctaccccacgcccacttctcccacaatataactgaggctgacagc

SEQ ID NO: 3833 - DNA, 243 bp, Homo sapiens
  misc_feature 68: n = A,T,C or G
aaacctacatttcttctgaccaagaagttaactggggaagaagaatcaagaaggaaaatgaccccaangatcagcttaaggaatgtgcctgcaagagagaattcacatgtcagacatgggacagaggaatttcagcctgctagctacaaccaacctttggataatgagatttcttcacactgtggtacaaaggtgtatttacttccctaagagaaataaaagagaaaggcacataacaaaaaa

SEQ ID NO: 3834 - DNA, 188 bp, Homo sapiens
  misc_feature 29, 116, 118, 142: n = A,T,C or G
gtacacagtgatcctgctggatgcctcangtccctggatccccatctccaagctgcggacacccacaggagcctgaccctgatcccagagtcctggaattaatccacctcatgaanancattttctgtctgtagcataactnttttctaaatgaaaagagatgcattttgtgattctgataaaaaaaa

SEQ ID NO: 3835 - DNA, 442 bp, Homo sapiens
aaaagtttgctgacgcctgatatggagcactagaaagaaattatttttccaagcatcaacccggaagtcccagcataccgagggtggcagacatcatttcttcaatgaacttagtatttagaaagatatcttcactccaagcatcaagtcttttctgtcctgcaaaagtcttaagtcaaaccagaatccactagtagagggcacctttggattcaacagtaaaaggagaatctacaaaaccagctcatcaaaaggggcagtgatgggtatagaagcctgaccttactctaagttcaagcaatgattaatctagcttccctcctggtggatgactgaggcctttgcctgaggacaactttaaagagatattgaatgaagctatgatacctggagcagttactgccattttggacccataaactgacaatccttaaacattcca

SEQ ID NO: 3836 - DNA, 205 bp, Homo sapiens
  misc_feature 46, 52, 58, 59, 60, 61, 66, 73, 75, 96, 132, 140, 148, 150,157, 176, 190: n = A,T,C or G
ggaaacatctggggcataggagtgactcatcttcccattgctggcnccacancacctnnnnatccnttctgantnctcccaccagccattactgancatcttctactgacgtttaactgagacaggacccantcctcaanaatttcantngagtagnggacggatacatgatgtanaaaaaaaatccggncctgatggggccccc

SEQ ID NO: 3837 - DNA, 127 bp, Homo sapiens
  misc_feature 46, 49, 68, 73, 90, 91, 101, 103: n = A,T,C or G
aacttacctgagctgtgagttcttaaattgcaaactagaacacgcngantattgggttctacacatgntatangacttgtggactagatnnaactacccantncatatgacttttgctgggataaaa

SEQ ID NO: 3838 - DNA, 285 bp, Homo sapiens
  misc_feature 95, 128, 129: n = A,T,C or G
agtctctttcataagcaacgttctggggctaaaaagctgggacagagagagctgcatgtttcccagaagaattgcagaagattgctaagacttgnggtaacttgatacacaacaataacagagtttanncaccctctctctatgaaattgcatgctgagaatgacagaagaggacactggaaagatcctggttcctcaatgaccttcttgggcagcttgaccactacctaggtcatgattcagattatgtgaaaaaaataaagttttatttcattaaacaaaaaa

SEQ ID NO: 3839 - DNA, 197 bp, Homo sapiens
  misc_feature 175: n = A,T,C or G
ggtacaccgtttctgtggaaagactgtcactacagcccagaactctggtggggcatggagaggaacccgtgagagcatgtcatggagggaaataatgattttcattttcacctgtgcctgactcagtgttcatgcagcaaagaacagaggatttaagtgtccttgtctggtctcnaggaaattcccaggagaaagca

SEQ ID NO: 3840 - DNA, 169 bp, Homo sapiens
  misc_feature 24, 42, 47, 48, 70, 85, 124, 150, 151: n = A,T,C or G
gaatgggcgctctttaaacacacncaattttgagccgtaatngacanntgggcattcatcacgggatgcncagcttttaatgacngcttgtggtgcacaccgcgtgtgccaccgagctatgacnttctgcatttttgggccctccttggnngggaagggggacccctgg

SEQ ID NO: 3841 - DNA, 120 bp, Homo sapiens
  misc_feature 24, 54, 56, 58, 68, 73, 76, 85: n = A,T,C or G
aagacagcttgctggaaagaaganggccttctttttctgcctgctgcttgcacngngnactttattgncctgnggntggaactgnaaacccaggtttgcctttagacatgggaacaattg

SEQ ID NO: 3842 - DNA, 193 bp, Homo sapiens
  misc_feature 42, 56, 62, 75, 84, 88, 97, 106, 114, 121, 123, 142, 165: n = A,T,C or G
ggagagaggtaaaagtccagactgccccctgcctaaactgancccaacctagaccnacccanccggcttgactgnaaacacctngacngaccaccantgacacccntggagctncacagcntnacccagcccacattggcanaattgtgaccaaataaaatgggntattggctttaagccacccaaaaaaaaa

SEQ ID NO: 3843 - DNA, 277 bp, Homo sapiens
tctgatgtcttgaacagctgttgcctgccaaaatggacaaagaaccaagagcagctgcaggccacgcaccaccactgggattgctgtgaccttcctgccttgcccctgggtcttaaatcaccaaactctatggctcacactgggctgacactgctgaccttacagccttgcaaatgatgtcatcaccatacgttcttcactcatgacgtggcatggatttgaccaaaggcgtgatcatgtttaaaataaaaaccctttatgagagttcaaaaaaaaa

SEQ ID NO: 3844 - DNA, 247 bp, Homo sapiens
  misc_feature 30, 36, 40, 49, 76, 96, 143, 150, 173, 199, 211, 214, 217: n = A,T,C or G
gtgggggactacgtcaccttttggagcaangttcancctnggttaaagnccaagctgaatttgggccctccgctgnccattttaaaatgggccgcngccctcgaggggaattccgggatcccggcgccgcccattttaaaatngggcccncttatgggcccaattcttttgcnttttttaccccttggaaagaaaaatnacctcattaaanccnccnctttggtttttttacccccccaattttttt

SEQ ID NO: 3845 - DNA, 246 bp, Homo sapiens
  misc_feature 19, 64, 84, 108, 137, 147, 150, 159, 160, 173, 215: n = A,T,C or G
gcttttctgcgcttgcaanccgatccttccaagaacgcttgcactggactattgcaaagtttgnggctcccttcccctgacacntagggaacccttgctctgacaaanagattatccgcgccggcctcgagctgacntttacattgnttngccacattnntcggcgaacttcnattcctggttggtgcacctttaaaaatttacttcccacgccnccgaggggtgttatcatttcccaagacaata

SEQ ID NO: 3846 - DNA, 146 bp, Homo sapiens
  misc_feature 29, 32, 33, 34, 35, 37, 40, 44, 61, 80, 108, 116, 124: n = A,T,C or G
tttctcctcttcttcttcttctccccccntcnnnncngtngtcnccttccctctctctttnccctttggttctcctcctncccccccccctttttttttttttttctntctccccnttctttcnttcttttccctccgccccctcc

SEQ ID NO: 3847 - DNA, 167 bp, Homo sapiens
aagccatcttggacaatgaggtgactgtaaggatggagattaattcgaggacagtggagtggaacgatggaggcctgatgaacgtgaagccaccattttagccctgggctacctatctctgaaattattttatctgacgagagaaataaacttctattttgtctcag

SEQ ID NO: 3848 - DNA, 243 bp, Homo sapiens
  misc_feature 16, 212: n = A,T,C or G
taatcttacccaaggncacacagcttctaaatgggtgttgtcggaacctactttcagagacctgattccaaaaccctcactgatactttccgtgagtccagatgaagagagggcttcaaggaaaatccattcagtgccaggatgctaccagctccctggggcatgggactgccatcctctcctaggcgtctgtcctgatacttccaatgtanatgtggaaaaactcaagtttcataaaaaaaa

SEQ ID NO: 3849 - DNA, 149 bp, Homo sapiens
  misc_feature 30, 61: n = A,T,C or G
tgataggaagacaactcggggaatgatgcnaagaagagactaagaagtcatgattattcantcccacaggaatttgagtcttttgacatccatcaccaagtacgtgaatgaatgaccttcagatgattacatccccagccaccctatta

SEQ ID NO: 3850 - DNA, 262 bp, Homo sapiens
  misc_feature 235: n = A,T,C or G
gagctgcagaagcagtgttcccatcatggcctggcgccattattccagaatgctgttgaagtgagggaaccaatggcaaccttgacatgcctcaatgatacagtgctttgtatacaaagacccaggacagaagcaagaggacagctggcttctagagtgctaaacacccagaaaatacaataggcaatttacagtttttactgacttataatttgctaaggggttcacaatttgntaataaaaacagcttactattaccaca

SEQ ID NO: 3851 - DNA, 160 bp, Homo sapiens
  misc_feature 29, 41, 54, 58, 60, 75, 81, 89, 105, 112, 140, 143, 145: n = A,T,C or G
tgattattttatctttttgcccctacccnaaaacttacttnacccccaaagacnggangnctcccttttatttcntttttnaccccacnaagcaacactttttanttacttnccccccgaaaggccagtccttccttatnacnanaaaagccttaattct

SEQ ID NO: 3852 - DNA, 198 bp, Homo sapiens
  misc_feature 27, 48, 52, 56, 81, 85, 93, 101, 119, 136, 140, 142, 146,149, 153, 161, 183: n = A,T,C or G
ctgtgtggaaccccagcccacatgganaatccacatatcatatccttncgangganccccatcttaggtcccaggtacccnccantaagctgnctatcagnaaatcttcaaactggaangcgcccacccccaccanactntnaaangtntganaaaccttnaccaaaaaatggcctacttaantccaatcaatgctcc

SEQ ID NO: 3853 - DNA, 259 bp, Homo sapiens
ggatttgcaaacttttcctgtaaaggaccaagattgtaagtattttagacctttgcgatcacacatacagcctctgtttcaactacgccgctctgccgctacaatgcgaaagaagtcttaggcaatagaaagggcatagaagcgttccaacaatacctcatttacgaaaacagagaactgcacagataatacacagatcgatgccaaataaaacaagaaggaaaagctggctctgtccaggaaagagctgaaaaaaaaa

SEQ ID NO: 3854 - DNA, 157 bp, Homo sapiens
  misc_feature 123, 138: n = A,T,C or G
gcattaagtcagaacttgagcatttaccgaagcatgtgtgagactacaagactcctacgcagtcagccccaaaaggtcaagagacctggtatttctagtgcctaacacagagtagacactcangtacatatgtattgngtaaataaatgatttacag

SEQ ID NO: 3855 - DNA, 272 bp, Homo sapiens
  misc_feature 23, 44, 47, 49, 53, 63, 75, 76, 85, 102, 104, 125, 139, 147,165, 203, 211, 217, 220, 232: n = A,T,C or G
cagcatatgagaccccatctctnggagatgagaatggccatagnccngngcgnccggcccatncctcggtcctanntcttgtgangctcccgttggagaatnanttgagcccatgccctctaggntgctgtgagctatnatcacacnactgaactccaacaaggntgacaaagtgaaaccctgactcaaaaaaaggaaggganggttggtnaaaganacnttggctgaaccntgaggagttaacacttggacattttttgattctgcaactg

SEQ ID NO: 3856 - DNA, 154 bp, Homo sapiens
  misc_feature 83, 114: n = A,T,C or G
gtgtgcctgccctcaacccgggacactggagctagcaccaaagcctacacggagaggatcaggacatcctgttgagcaccatnaacatttccttcctcaagaaaaggaaatacnaatggatttattctcagggctacagatttaggaaaaaaaa

SEQ ID NO: 3857 - DNA, 146 bp, Homo sapiens
gccatggagacacaatcgatattgtatggagagaatctcaagaagagatacttctttgccacatcatgaattctcattccgtcattctcatcctttgattggctgctttgatcaaacgagtggaactctaacttcgaacaaaaaaa

SEQ ID NO: 3858 - DNA, 175 bp, Homo sapiens
  misc_feature 18, 22, 28, 44, 91, 95, 124, 129, 134, 136, 149, 159: n = A,T,C or G
gccccaaatttcacgctnctgnaaattntattcccaatataacngaaccctaggaatgaggcactttcagagagcgattgatgtatgctanatgnctgccctcatggatgggcaggattcattnatggnctaangnaatcaatgacccntgggttttcntggaaaatgcggcctg

SEQ ID NO: 3859 - DNA, 128 bp, Homo sapiens
  misc_feature 58, 62, 64, 72, 77, 78, 99: n = A,T,C or G
tcattaaaagcccacccttcttggtttattttaaccccccaaatctttcaaaaaaggngtananaaacttgnaatannttttttctgtttgtttctaanaggcccaatatataaaatatatataaggg

SEQ ID NO: 3860 - DNA, 288 bp, Homo sapiens
aaccagtgtgaacatggtgatattttacaagttggcaacctgtacttcgctgctcaaaaatgctgcattccaagggctacaatcatgcattgtgcatttgaaatgcctgttgctaagaacaaatatcaaccccaggacgaccccactcagcagatcggccaactcccgcacagagctgtttcccgacctctggtcagagacaggaagcccactggaccctaggcccaggtcaagaagacatcctccactcctgcttcctgacccgcctggactacctggaaaaaaaaa

SEQ ID NO: 3861 - DNA, 208 bp, Homo sapiens
agaccgtgaatcccctgattgctgactccctggtcccagcactgtgctgatgaattcctgatgtccacggagccactacaagatctgagatttatagctctgaaacttcagaagataatcgagatgatacctttggataaagaacctgaatgtatcaactagactgtttgaaaagacacattttaataaataacctgaatataaaaaa

SEQ ID NO: 3862 - DNA, 307 bp, Homo sapiens
  misc_feature 51, 80, 86, 93, 96, 98, 105, 111, 155, 160, 179, 198, 208,210, 285, 289: n = A,T,C or G
cgtatctactaaaccgttttaaaaggagagagttatgctgaattttatatngctggcaccgtgaaccttctgtggctganaaaccntaaaagnacntnatttagngcctgnggacccccccaggtaacaagatgaggggaaaaattgggtcccangactngcttctgactgctgccatntctggtcacaacagctggnacccactggnangggctgtcccctccgctaaatatgtgctcaggacttctgtaccccggtggcaaaattgcaactgccccccgaaancaanctttttcttttgggcccc

SEQ ID NO: 3863 - DNA, 137 bp, Homo sapiens
actcctctccaaaaccttcagatgcagtgctgccaggacccacctccaatccaagatttgacacctgagaaaaagcccattcccatgcctaatttagagttgggagaattaaagtcatgaaagtttctaaaaaaaaa

SEQ ID NO: 3864 - DNA, 124 bp, Homo sapiens
ttgaacactgccaagaataagcaagacacaatgggctttgcgaagggaaagaaaagaagataagcactgaacccaaatgccaagattataaatggaataaaatttcctaaattctaaaaaaaaa

SEQ ID NO: 3865 - DNA, 242 bp, Homo sapiens
agattatctgagccgagagtgagctccgctaaaacgtaggctaaattcgaggacaccggtggcactacatctcattctttcagaggagatgcttgcactacagtttggacccttgctttttgacatttcagagaaaacatctaaatattgctaaagctggattactttacctcctactccaatattacctaatttttttacggtgaaaaaataaaagttcctatatgaaccgataaaaaaaa

SEQ ID NO: 3866 - DNA, 126 bp, Homo sapiens
  misc_feature 18, 42, 53, 110: n = A,T,C or G
ttattgtgaagagcgaanggacaaagcttccccacggcacanaaggggacccnagcaggttacctgatattttttaagattacaacacggatttagaattgaaataaagntttagaaatgccttat

SEQ ID NO: 3867 - DNA, 107 bp, Homo sapiens
  misc_feature 23, 35, 38, 44, 48, 52, 54: n = A,T,C or G
aaaatgtgttgccatgggggggnaccccccccccnaancctttnaaangctncnttttaaaatatgggaggcaataagtttaaccttcggaagggaaagaattcttt

SEQ ID NO: 3868 - DNA, 171 bp, Homo sapiens
  misc_feature 18, 24, 28, 57, 76, 102, 140, 150: n = A,T,C or G
accaacattgactttganaactgnctgntgcccaaaaggggaagataatgactgganacacaccatcaccacaggnaggctcgacgctggaactgggcggcnagcttatttgaaagaagaagaaggcaggggagccacanaggtcttggngactcttgaccacacccagct

SEQ ID NO: 3869 - DNA, 452 bp, Homo sapiens
gtttttcatgatgtccttcaccacctctgccactttgccaaaaacttcctataagacctcagagacaaagcttggctgatgggagaattaaagggaagttcaatcagagagtaacagatactgagcaagcttaaacttgacctcaagccatggaagaggcatgtttcttgattgtctcgtgatcttccacctcagcaacaggaaactccacctctagccccggaagctgttccagggtctttgtgccaaactgacttccaaaatccattgagtcttcacttactatctggggattggtctattcctaaaacgattagccgtgggaatgtgtagggtttacggtttggatctgagaccataggtcaatcacactgtaattcatatcaatcattttctcaaagtatagttgtccaattttagtaaatgtcatatggaaagggtgtaaaaaaaaa

SEQ ID NO: 3870 - DNA, 138 bp, Homo sapiens
atcaactgatcaagatggcacagttctaagggccagcctatacttttttttgcctcatccattattccaagtcactaacatgatgcttgataatgaatctaagaggaataaaagaaaagtacaactggcaaaaaaaaa

SEQ ID NO: 3871 - DNA, 208 bp, Homo sapiens
gatccgtgctcccggtatcccagtcaagttgggtgaattctcccctgaaattcttccatcactcctgaagcaaagataagaaactgaggctgagaaagaactgctttgcccagagttgcacagctggaacctaccgcatacacagagggaagttgataagtggtgtctggaataataaagaatgttcctggggtaactgaaaaaaaaa

SEQ ID NO: 3872 - DNA, 363 bp, Homo sapiens
  misc_feature 22, 50, 67, 78, 80, 122, 125, 165, 171, 184, 197, 231, 234,241, 244, 248, 258, 263, 297, 298, 303, 305, 309, 311, 317,319, 320, 336, 343: n = A,T,C or G
aaaggaacgagctcgcagccanacgcctgcagccaaaccagaatggaaanagctttgaggttccatntggaaccttgnanaaaatactcaactgactgaccatggcgaacagtcatttatcntanatagacacacttgcccttgtatgccttatttacacatccnaacccntgaggcattgatntcaaatgctagangcatgccactctgaaggttcgcatcccttatcanttntacaaanaancttnattccctaanttgcntacaaatgggccaggggtttgtgctgacctacgnnaggantngctncnctgacntnnacgcgggggatgcacnatagccncttctttggaggagctcgaa

SEQ ID NO: 3873 - DNA, 163 bp, Homo sapiens
ctcactgtccaaatcctgagatccagaagacaggaacaacaaaataatctgctgacatctttgaatgtagatttttttaaaccttcgtgtctctgtatttccaaggcaaagtacattcttgatatacagtaggtgttcaataaatgtttgctgaataaaaaaa

SEQ ID NO: 3874 - DNA, 427 bp, Homo sapiens
gtggggtctttcactggtatccatgcccaaggatcgacgcccccttacaacattctgcaaaataattcctcaacaaaaggttggtgattgtttgcaaaatgaagaagtggctactagaaaccagtgtggatgcactcagggaaagtcactgagaactacaatgtgaatagattgagcagaagcagaaaaaaacttctccaggacagtactcaagggcctgtctggctgtttggagggaaacaggacccaaagaagatcaatccctgccacgtgaagtcgaacgccaagagtttactccagaagcttcctttcaactggtcaccaactcccattccctggaaatcctacccatcctccacgtgcattattacagtctttgtgtggcatgaaagggacctctgcataaactactttattaagaaaaaaa

SEQ ID NO: 3875 - DNA, 251 bp, Homo sapiens
  misc_feature 18, 23, 28, 29, 31, 33, 34, 37, 38, 51, 91, 99, 103, 104,107, 136, 146, 155, 156, 187, 216: n = A,T,C or G
ctggaattacactgaagnattangtgcnntntnnctnncttaacatgatgntacatcatgtcacacactagatggatgtacaaggctcttnacatacanctgnntgnaaacttagtgagaccccgtcctaaccttncctttcaaangtcttcaanncaatgccactaacacaccacctagattttangtgcttcacagggccgatgtgttcatagnttttgactattaaaactgatttgaaactccggaaa

SEQ ID NO: 3876 - DNA, 465 bp, Homo sapiens
  misc_feature 33, 42, 50, 56, 106, 116, 126, 139, 155, 163, 180, 258, 281,282, 297, 311, 317, 332, 346, 352, 367, 375, 379, 383, 398,432, 448: n = A,T,C or G
atttacctccacctttctggccaagacttgccncctaggacnggcccttnattganacaggtcaacggaggtctagtggtaaggtacccttggctcatacagagcntgctggcccncgccaggganctggaacgcaccntagacgataaccatgntccctggnacatagctatgaccacnttgaaggagactttgcctcgcttgccgcactgcaagggaaaacgctcggaaaccactttacggcacccttttggttanctccacacaagaatcgtttcctnnttgcttgcaaggggngaaggcttttaaanaaatcnttggccttgccaatnaaagaaggaacaanggccgnggggttgccccatangtaccccntganggcnccccaaatctcattncttgaaactgcccccctttcccaagggaacttgntgagggttttttgcantaagcggcctctttggg

SEQ ID NO: 3877 - DNA, 160 bp, Homo sapiens
  misc_feature 29, 38, 41, 60, 71, 84, 110, 117: n = A,T,C or G
agactggctatgactgcatgccattttgngcaaacaanatntggcacccactgaaaccgncccgctcttantggctaataatangccaatgcactgtctgcacctcgtgngggaaanattgctattgtgttccccaaaaacaaaaatttttcttttgggg

SEQ ID NO: 3878 - DNA, 118 bp, Homo sapiens
  misc_feature 35, 43, 45, 54: n = A,T,C or G
aggaattgaaagaagatcatctccttcaggagggntggcctgncnaggaccccncccactcccacctcccaacttacagatgtccctctacaggccattcccagccagctgacccatg

SEQ ID NO: 3879 - DNA, 520 bp, Homo sapiens
  misc_feature 107: n = A,T,C or G
gtttctctgggaattgtgttggctgtggaaagaaaggcttctgttacttcacggaattctccaatcatataaatctgaaactgaccactcaacccaagaagcagaancacttgaagtattacctggtccgtaatgcacaagggactctaaccaaaggacctttaatctgttggaaaggctcagagtttagaagccggcagatccccgccagtacttgttccagttccctcttcccagccctggagagcacggctgccttccccagcgagcccgttcctgggacgaaccccagcatcctgatgggagctcagcaggcaggaccagcttctgatcacccctcactaaacgcagcaatgggtccggctgttttcaacggcaaagattccccgaagtgccaacaactggcaaagaataacctgttggccctgccgcgaccatcggctttaggtagctctgcctgtcctggccgtcctggggatcctgctcttctttgggccaaggccagagggggcaatgggag

SEQ ID NO: 3880 - DNA, 353 bp, Homo sapiens
gacccctttcccttcttctagctcttctgagaaccctggagggtatacacattccaactgggagatccatttgatttctgcttcaagttaagatgttttgtatctttaccataaagtgattgatgattagaagctgaggagaattgataacacaagaagataatgcatttcgaagaggttttggaaacaaacagcaacagaaaaagattcttcgctaacttttgagaaagaaatgatctcaaaatacccttgtgtctactgatatttcaaggtaagggaatgctctggaatgcttcccattttccaaatgtaatattttccaaaataaacttgggagtaactgcaaaaaaaaa

SEQ ID NO: 3881 - DNA, 260 bp, Homo sapiens
atgatcatattaaaatgaggacatcatgcctcctgcttgcacagctggataaaaaaaatcttttcggaatttcatccacgtgataaaatctgatggtcacaaagaagaaccctagacttcactttaaagatgagtcaacaaataggctttttcccctgaaatccatgtctgtgagtcactgaaacagcacaacccttgattgtctactatttatttgtatccacttagtctttattaaaactatcttttaaaaggaaaaa

SEQ ID NO: 3882 - DNA, 422 bp, Homo sapiens
  misc_feature 95, 104, 133, 192, 218, 235, 245, 249, 277, 316, 322, 328,364, 380: n = A,T,C or G
ccagccctgcaggtactttaggagaaaagccaagcaacttcctagtaataacaggtaacattgggagggttctgtggtgccaggcctggctatgngctttctgngtatttactcatttaattcttcaacaagnccataagcattggggctttttattatctaataatcccattttttataaatggggcccanaaaggataagggaacttgttcaaggnaacccagcttgcaaaanaaaggagccngggnttcaaacccaggccaagcccttgacccnccttgggggggtaccttttcccccttgacaacttccccnaaattnttaaanactcccttcacatgggctgggcccaaggggttatgncctttaatcccccccnttgggagaaaatcctggagaatttttttaaaccccaaattta

SEQ ID NO: 3883 - DNA, 108 bp, Homo sapiens
  misc_feature 30, 31, 36, 42, 55, 80, 87: n = A,T,C or G
cacactatctggcacttaatttcatgctgnnaggantccgtnggatgaatttcanaaatcattgggttggccctggaaantaaaccnccccccaaaaaaaaagggccc

SEQ ID NO: 3884 - DNA, 323 bp, Homo sapiens
gaagacataagaggagaagaaacagaagtgccaatgcaggagaaaagaaaagagaattccaaggataattgctgggcactatgagaaaacagagactactccatgttggagcactgtgctctggaaaaggcttcttcaagatgatgaaactgacaaagtaagtgaaggaaatgggaaatttgaaagaaaatgggaaatttggacaactgatagaatgtttagtttgagttagtcacaaggacacagcaaatcatgcaaataatttatgttctaacctgaaaattcaagtaaatcaattttttaaatgtttcttgaaaaaaaaa

SEQ ID NO: 3885 - DNA, 442 bp, Homo sapiens
  misc_feature 22, 203, 246, 252, 304, 325, 337, 347, 352, 361, 363, 365,370, 379, 389, 392, 427: n = A,T,C or G
gaaatgaagaataagataaggnaggaagatgttgaagacagaaatcacagcacctggatcacaatgggggaagcatgtcctctattcacaggaacaagataccttaaaaatgctttaaaatacaattaagtggttttcgtaatagcagaaggccaaagaaatgtcgggtccagtactcaatgacatcactgtttctcaatcangcatccaggacctactgctacactatggaaactaacaaatggnacagtnttaataagaaagaaacagatcaccttacagctggccaaatattattataagnaatggccgcttccctcttttntaaaacttgganaattggcaanattanagttcttcntncnaactntaaacgggntggccttggncantggacccccctcattaaaagggacctttaccgggnttttactaaaaaaaa

SEQ ID NO: 3886 - DNA, 397 bp, Homo sapiens
  misc_feature 302, 349: n = A,T,C or G
gctgaccacaggagcctgaaccctgaagcacccagagcctgctgggctatgggcttccatcagctttttctacctgacacgaacatttggtttccattcccaactcttctcataattcttggagatcatctcgtgccggtttcgggtccagcggaaagaaagcagctcttgggagtgtcagcttgcatcccgtgggggtggctttggctcagccagcagtgagtctgcctttccaatggcacccctggccgccccaaaacccatccatcctgcaagctacccacccgctgtcagcaaagcangcgcgtttcctggtgtgcgggaaccctaccccggctctgctccccangggcgtggccaaggttctgggattaatctaaggcagaagcttttgtcc

SEQ ID NO: 3887 - DNA, 453 bp, Homo sapiens
  misc_feature 19, 35, 37, 42, 47, 48, 49, 54, 73, 79, 85, 87, 94, 95, 96,99, 113, 116, 122, 124, 128, 130, 145, 159, 160, 178, 225,251, 283, 290, 296, 315, 318, 320, 324, 344, 351, 360, 362,364, 366, 371, 384, 417: n = A,T,C or G
tgcccgttgagaccaaganaacgggggaaacaaancngggcnttggnnntaggngaacctcaaggttagcccntaaccnttttgnangaaggcnnncancaactgaaggatcnttntttttnancaangngggccaatcatggtntgaaccccttgccnnaattcccttacccgggtntgcccccagggagccgggcttaaaggagctagcccattcaagccggnagaaaatcccccccacccttttgaangacccacttttagctgggacccaggccccggnctcatgnaaacanttttattttcaaatgaaangangnccancttgaagcttgaagctgaanaatcttnccatctggncngncntgggngaaaaagccttcnttctctttaaaaaaaaggccatttttaaactgntgaaataaaaagactggtcatttttccaaaaaaaaa

SEQ ID NO: 3888 - DNA, 381 bp, Homo sapiens
  misc_feature 28, 35, 100, 122, 133, 140, 145, 157, 161, 163, 164, 166,185, 230, 297, 340: n = A,T,C or G
gccaaccagggaccaggaactttactanataccangagcacagcagtcaactcatgcctacatttacagcatggattttaatcaatgacaacacttgcgntgggaaacactcctcaacactnccactgggaantctgacntaganacgcctctcccnaggntnntntgcacctagcacgtggctnaaacatgcatggaactgaaatccaccctatgctgaaattattgtnacaagtctctattgttacccacttgcttccactctcagctgtgaggtcctggaagctgggggtttgngtctctggcactgagggctgcttatacatagcagatgatgcanatttagccaatggattaatggagaaataaatgaaggaataa

SEQ ID NO: 3889 - DNA, 532 bp, Homo sapiens
  misc_feature 470, 475, 488, 494, 495, 501, 509: n = A,T,C or G
ctggtggctattacaccgaacgttcacttcttaaatccgaccctacaagaagaagcctgggactaagccttgagacaacgagcattcgatggccaagtagaagatgatgaacctgcaaaagactaagaagctgtcaaagagaatggatcccttccaaaagtaacattcttgcctacattagtcttacttgggaggactcatgaattatttgagccagagcacgtcatgaagttgcaataaaggagctgcactggtggttcaagaccttgaaactactctgcctaggactcctgattgctgaatccttgaaatgattagtcaagcttgacactggggcatgtttgcaacagcatggaaggatgtcttcattttcttttgaaaatgcacaaactttgaagtgaccatgctaagcgccctggacaaggagagaagagaatggggggcttggtgaatggccaggaggaagaggnagtgntttctcggctganaagaannctgagngctttganaaacattattgggggctgggtaa

SEQ ID NO: 3890 - DNA, 570 bp, Homo sapiens
  misc_feature 521, 554: n = A,T,C or G
ctaccatcagcaaccagttctgaacaggcctggaagcatcacataatataacctgacatcaggttacttggatacttggatacttacagtacacttcttgctgcctgccctaggacttttctaataccagaatgtggaaccccacaagaagtactcagcactcctgcagcacaatctgggaagtaaaacaacccttgaaaaggagctgacagaaatgtttctttgctttgttccttccatagtcagttccaaaagtcctctcagagagtcccatggattaagcaaccagactgccctagcattataccattgtactgactctcccaccttctcttttcattcctcctaactcttacttctgttccatgagatcatacaattgaataaaccagtcacatatcaactccgcaggctaagagaaaccaaagctacaataacatcccatcaacaatacagtaaagtggaattgggatcccttgtttagtggctgaagcccaaaggataaccatgaaaataaatgncaaaatcaagataggaagaatccaaagatgccncttcaaggctcaccaa

SEQ ID NO: 3891 - DNA, 430 bp, Homo sapiens
  misc_feature 359, 373, 376, 378, 392, 405: n = A,T,C or G
ctggatgagacatctgagcgaagtggcacaggacggctccagcaccgagctcagtgcacatggaacgccatcctccagggtcccgctctgtggctgcgacagatggtgagatgatggggcccaggtgaacagaatgaaaaataccagcatgggctagagcaggcaggtgcctttggttgatccccagccctgtgggaagcttccacagcgggcattctcctgcaagtttcccctgtgagcccccagagaggagggcaggggaggcctggaagcccccatccagtcaaggcagaaagggttccagaggctgggggggtcccatgatctggaccactttgtggatgactccaggccagggnctcccccgcccaanctnancatacaggactggnccttccccctggnttacggacacattcattctcctctg

SEQ ID NO: 3892 - DNA, 412 bp, Homo sapiens
  misc_feature 29, 30, 48, 52, 93, 95, 102, 129, 160, 165, 183, 204, 225,231, 238, 277, 278, 296, 300, 304, 320, 322, 325, 326, 333,349, 368, 378, 382, 383, 388, 389, 391, 395: n = A,T,C or G
cacaaactggagggcatggcatttccctnncagccaattggatgaagnacanaatctttttgcgggggttttttccaggggggatacgacggngnattccgnataaaacttttgatggaagaacccccnacccatgggggatacttccctttgaaacaanaaatngggaattggcaccgccanggttcttcccggccgcttttngtgggaagaaagctatttccngctatngaaatgnggcacaaacaagacaaatcgggcttgctcttgatgcccnnacgcggggtccccgtatngatnaacngcaaagggggccgccntnggnnttttttntgagggggaaaccganccccgtatccggtgccctngaaatgaaantggnngggannangcancgcgggttattataggg

SEQ ID NO: 3893 - DNA, 471 bp, Homo sapiens
  misc_feature 424, 435: n = A,T,C or G
gcaaacgccaggtgctgctacactacacatctatcgtataccagagctgaatgcgtgtgtggactgcggatgaccacctggccgggagctgtaggtacatctgttaccaaatggattacaatttctggcctcctacagctcacagtcaagtggggaagagaccctaaacacaataaatacgaaaactgcacagtgtgtgagaggtagcgagtgccatcaaaaaaatagggtacaaatagaaaaagacgaagcagcgggcaggcgtcatgtcaaaatcgagtgctgacagcaacgctccggatggttaaaaggcttaaaaaggtcagaagcagaaaatctaatggcaacagtggcatgacagtgaggcttaagtataaagactgagaattagaacaaggagtgggaaaggagagggaaggcgcanattccgccggncaagggacgggtaggcctggtgactaagtgggatgg

SEQ ID NO: 3894 - DNA, 220 bp, Homo sapiens
gttccttcgccatttcagctgccaccatcccctctccccaaaaccccagtagacatcaacagaatccagaaactacagggtccactggcatggcagggcctgtaggattcttttccaatgtgtacagattggctgatgcctggactatgccagttcactgttttaaagattactcttgattgtcacaattaaaaacaaagaatatttagaaccaaaaaaa

SEQ ID NO: 3895 - DNA, 489 bp, Homo sapiens
  misc_feature 153, 206, 326, 333, 334, 339, 340, 350, 355, 358, 365, 369,372, 375, 385, 412, 421, 425, 440, 449, 467, 472: n = A,T,C or G
gtgctttgcctggtgactcagttctccgacgggtgaagaagagttgttgattttcagtttgttcatccttttccttccgtgtggatgggaactggactggaccctggagcccggagccaagaagtcaggaagatgattccacaggagctcagntcactccctcgccctgcctcccgccgggcctagggatgtagctggatcagcanagctgcctccttccccagaggaatgacaccagccaggaaccgcacagggctacgcagagacaccaggaaacagaggaacggcaccagccaggaaccacacagggctacgccagagactcncaggaannatcanncacttatgcnggaanaanacattangcanaanganagcatacagngcccattaatatcaagaacacgaaaangctggcagntatnactgctcttattcanaacacattnaaatcccaaaccattgcnatacnatttaaaattaccaacc

SEQ ID NO: 3896 - DNA, 312 bp, Homo sapiens
  misc_feature 184, 185, 187, 278: n = A,T,C or G
gaataaaaagctgtagaacctcctcatggcttctgcaatgacaaaccctgcaccagtccaaaaagcaatgactccctccctctgcacagaaaactgagctcgaaccaatgtctgaccacttcccttcttgatccaagatatcctttccagcaaggccagcctggatcaggcctcggattagggnnangtttggcattcctactgttctcacccccagggcaggcactgtgcagagtctgtcccgtgacctgcattctttgcagggttaatccttttgnctggcccctgcacttaagtgggtataaaaaaagc

SEQ ID NO: 3897 - DNA, 365 bp, Homo sapiens
  misc_feature 269, 346: n = A,T,C or G
gagcagtatctgtttggataacaaagcattgcagacctggacttaattatatggaataaatgtgcatatccaagtggctgctagaagtaagtacacagggagcaagccttgcctgtttctctagtgccctcacctgcttgggagacacgctgtggagatccgcaacaactatggcgggagaagatgtgaggcttgttcgtccattgcttctggtttcctagaaggggctgggctacagccctgtagtttggcctgttgcaggaagccgnactgttgggggcagctgctggctctggctgagcctcaaatgaggtcacaagatcgggttctgatccgctgcaggggnaaggggaaacagtaaattg

SEQ ID NO: 3898 - DNA, 410 bp, Homo sapiens
  misc_feature 260, 324, 347, 371: n = A,T,C or G
agaaagaagcttgcagcttcttgcatcagaaaatcagatagagcctctctggcaagaagctgcagacacaaaagaagcttgcattgaaggtgactcagctctggcttttcagcaatgccctaacattggctatttaaaaagaggcaaagtagcttcagtgagacctcaaaccaattgcacagctagccactgcccataaagaagctactggtcagaaatgctggctccttcatagacaaaacggcaaagtacattgatangggcctgtggtcccagaggatctttatatcctggccaggaatggcatttggcttggcacctggnaaatgggcctggagccagcatgngactggctcggtctgcaaggcctncagacaggttaaagaagaaggctttaacttaaaaaccaa

SEQ ID NO: 3899 - DNA, 142 bp, Homo sapiens
  misc_feature 28, 31, 32, 33, 44, 57, 59, 65, 74, 83, 90, 105, 106: n = A,T,C or G
ggggggaaaccaaggagggccccttccngcnnnttcagacaccnggccttactgccngntgcctntactgaacngaaggaccnaggatanacgacaaagcctccnnctctggtctcatggaaaagggagtctgaaaaaaaaa

SEQ ID NO: 3900 - DNA, 581 bp, Homo sapiens
  misc_feature 421, 428, 509, 516, 517, 526, 529, 548, 564: n = A,T,C or G
gctgggcacattctgcagattactgctcaaaggagcctggacaccagattctcttctggacaccatgaagaatacagcaaaggacaacacaggccctgtcctcaggatttcaccagcagcctgggaacaattgccacacgaattttatagctatcagagtcatgtgaaagcagggaatggagagattgcttcctactggggaagagaagagtcttcagggaagagggggccctggagcagaacataaagtatgtaaagaagaattttgtgttctgtatgctgagaaaacccctctttacccacgccctggcaacattacaggatgtcatgctagggagtgctgttgagtggggaagagtctgtacacctgccatgtaataactgttggtgggtttttcttcatgtgtttcttcctgtttgnttaatgnatatattttcattctgcctccaggacacagtgacacattatccaagttttggcaaaggacaatgcccgtaaagggtgtggnaagagannccctttgcnaanaaggctgactttgacaagntaatatccaatgctgnttcattggcttctaatt

SEQ ID NO: 3901 - DNA, 175 bp, Homo sapiens
  misc_feature 18, 32, 47, 54, 66, 67, 68, 69, 95, 120, 124, 138, 151, 159: n = A,T,C or G
aaggccgaatggccaccncccctggaattggnaaaaggaaggtaaancaccccnagtctttgcccnnnngggcaaactaggggttcttggcaaangtacccaaaaaaaatgccgggggtnaggntcctgaactggacnctattttcagccnttgcgggnaaaaaaatgcctgcct

SEQ ID NO: 3902 - DNA, 432 bp, Homo sapiens
ggccacgcaggaagaaatctcttttcttcacatggatttgattatgtctgggcctgaaatagcaaccaccatctgtcaacaaagggagaagacaaactaaggacagagcctccatgctgagaatgacacaacaaaaggtgggaaaatactggacccccgatgatgctggtgggccactaaatcaatcagtcctggagacacctacctatagaactgctttgatgtgagaggacattcttatttaattaataattggaattggagttttctgttacttgtatccaaaagggtctaggcaatactctctgtaaccttggtcaagtcttttatccttaccaactgtcaattttctcctctggtaatggagttaagcaacgcttaattcatgaaatgggtgcaggatcaaatgcaaaatatctaaaacattgcaat

SEQ ID NO: 3903 - DNA, 221 bp, Homo sapiens
  misc_feature 44, 82, 84, 88, 101, 147, 153, 167, 197, 206: n = A,T,C or G
ttagaaggacctcagttgccagaagcccagctgacaccttcttncataccaagcttgcttcaaaccaagccctggggcctgntntttnggggggaaccatngcaaggttcacccatcagcttaaaacatgccacttggattatttgnagggcnttttttaattgacnagggggaacaaagggccccataataacaanttgggttgntaatggtgggaaata

SEQ ID NO: 3904 - DNA, 488 bp, Homo sapiens
  misc_feature 339, 448, 450, 473: n = A,T,C or G
cgctttgccgagggcaaggagaagtggcgtggccctggctggtgggctgcaagctccactcaccacgcgggaaccccgagctcccgacacagctgcgccaattgccagcattcccccaaagcacaagagggtcatccagtaactcgcctcacgggaagtcttctgaggaatgtcccagacaccaggccttacgagattcattagttacaaaagacgtccaaacaagggaaacattagccacgcagaggagagagccgatggaagttgagggaaaggttctgcacctccaggatcagtcattgtgcctgaaagtcttcccggtcctctttcccttgcagnggtgctgtgcctccctcttgccagtttcaagcctatagactttcactcacctgaaaagccccaagtggagacctgcggaggctcttaagttggacagatctggattcangnccccaacttttgtttttactaanccgggggaccggtta

SEQ ID NO: 3905 - DNA, 219 bp, Homo sapiens
  misc_feature 41, 54, 63, 82, 100, 107, 149, 161, 164, 193, 204: n = A,T,C or G
agccaaaagaagaaagggaaaggccaacccgcttggcttcnttctttccccttnttggggaangccttccaaccaggggggngggaaagggcttaaaccnaattggncccaagggggcaatccccatttttgggccttactttaaaaancccccattgggnaantttttatttttggcctttttttttggccngggggggggantttatggttaaaaat

SEQ ID NO: 3906 - DNA, 279 bp, Homo sapiens
  misc_feature 32, 37, 47, 51, 57, 58, 71, 100, 102, 105, 109, 137, 140,141, 146, 151, 156, 178, 182, 190, 191, 193, 204, 223, 229,259: n = A,T,C or G
ctactgccagccagaagctgggcttgcccctncccgnccataggctngagncagaanntagcatgacatgntggattatgttaacacaatcgattgatanantangatnggagacagactacctgctgtataaatgnatnngaatngaacntagcntgactaattggtttattatttnattnccttgtgnncnttaatgggacnattggctgggaggctctantggatnaaaccccttatgctaccgtttgtattaagnctgcttgattatagggcctt

SEQ ID NO: 3907 - DNA, 178 bp, Homo sapiens
  misc_feature 30, 32, 38, 40, 52, 61, 76, 86, 101, 124, 125, 160: n = A,T,C or G
catgacatggtgaattatgtaaaacactcnanttatananatgatgggagangcctactgntgtaataaatggatnagaaagggancgtagcctgactatnagtttatatttcataccttgtgnngtcaaggggacattggctgggggctctaatgggantaaccccttatgctaccg

SEQ ID NO: 3908 - DNA, 351 bp, Homo sapiens
aaacagtctgctgacccctgctggaggaggacacaatagcagccttgggatgtggctggcaggagagctcctccctgcttcactgtggtgatggtggggccagcagagcccccaagggctgctagccatgccttgggtgtgctatgggtatgtgaaatctgcttcgtggggacagccttgctgagaagccaagggtcctgcacaagtcctccagttcttgatacccagctgcagtgctagagtacgtgtaccctagcacagcctggagggtctggacatcttagatcagcttcattctctctctctctctctttaaacattaaaaaaagaacattttattgagaaaaaaaa

SEQ ID NO: 3909 - DNA, 193 bp, Homo sapiens
gccctggtgggaatgggttcaatgagaagatctcctgagcctgagggtttgcaaaagatcccatggaagaaaagtggttttcccaggggtcacaatattcaagtcaccactttcctgagcccaagggtctcatgaccccagatgtctacaggaacaccagcctgtccagcaaccatgtgcatttcaaagagcc

SEQ ID NO: 3910 - DNA, 299 bp, Homo sapiens
  misc_feature 21, 40, 117, 124, 126, 133, 140, 191, 200, 213, 250, 254,262, 278: n = A,T,C or G
tcgccgcaccaccttcctganaggacaaagtgggtcctanaggctgcacccaggcaccacaggcaggagcacacacaagggactcctggctgcctgcccggactcacccacggctgnctgcgcntnggtcctncggcttnaaggatgattgtgccttcagctgtgacttcatgatcacatcatggcctggntttaacttncagcagcaaggancttgactctttcttctcgcacaagtctgaaagggganaagnatctgttntgggggacggggccangaacttgtggggccaagaagg

SEQ ID NO: 3911 - DNA, 421 bp, Homo sapiens
  misc_feature 17, 24, 85, 121, 141, 152, 158, 163, 172, 176, 188, 283,302, 322, 332, 382: n = A,T,C or G
gggtggcagaacgtatnagaaacnccatggaaaaaatgatcaccaacaggtactttgggccccataaggaaggtacttcccgttnaattatcccctggtggaccctgcaccgtacaccatncaggatggcccgggaagccnactggaagatncacaanaaganagtggaagnatancccttaactggntgacatttccccccatgggtgattttggtttccttgcccccactctaacttggatattgatattattctccccttcaccccactttaagaaaggnacttttgcaaatatttctnccccactctttgagaaatgnaaattttggnccaccctattcccaaaccctattaaagaacctaatggataaatccccccnccccttttggcttgacttcccttttttcaagaacttaag

SEQ ID NO: 3912 - DNA, 273 bp, Homo sapiens
gctgtaaggaagtcaaggccatatggaaacactacatgtagggactcagtcccagctgagccccctcttccaacatcccaagccaggtatcagatgtgaaggaacaagcctccagatggttccagaccccagctgttgagtcttctgtgctgaggccagacatcacggaacagagacaagtgggctacccttgtgccatgtctgaaatcctgactataagcatgagaatccacaaacataataaagtgatggtttgagctactagaaaaaaaa

SEQ ID NO: 3913 - DNA, 185 bp, Homo sapiens
  misc_feature 31, 46, 61, 73, 77, 85, 93, 114, 121, 131, 140, 163, 164,166: n = A,T,C or G
atttgcttcattttgacaagccgaggggaanctgggttcaataagnctttttaggcacccnttaaaaaaatgngggnttccactnggtgaacntttttgaaaaggaatttgagnttccggngacttaaaantctttttangcacagggttcttgggcttcccnncntgggggaagaaaagcgcct

SEQ ID NO: 3914 - DNA, 442 bp, Homo sapiens
  misc_feature 409, 426: n = A,T,C or G
gaattattgagaaaagaaaaatcttgggatgataaatatggtctgaagccgtcggctgccagcagcaccccttcactgattggtcctgcccctcagatcatatgagggtgaagggaggtgagaatggtttgtatctctaactcaggtatcctgcaagtaggtattactgtctctattttaccagagacagaaactgagtctgaaacggcaagagtcttgtgtgcttttgtctgtgtaactggaccttgtactccacattacacaacagcacatcaactagactttgaagaaacacggggaaggagcagccgtgtccaggggctcatggatctctgcttggagacagcaaaaggccaaccaccaccactccccgcactggtctgacctttctgcttcatcttctattcgngaatatttgttttctangcactattctaagctc

SEQ ID NO: 3915 - DNA, 490 bp, Homo sapiens
  misc_feature 450: n = A,T,C or G
ctcaatggcacctgttttgcatggagacaagcacatgcaagaaaaagttgtaaaagtggaagcaaatgtggtctcagaagaggattgagaaaaacttagggagtcaggcgtaaacaagcatttgtcattcgattcttctagtgcatttccagcatactgtgccttgggcatgacacatcagaatctgatgtttatcttttattacctgccagacccctctggaaaagcctctatggaattcatcatctgcagtctttgttgttcgcattctcaggaagtgaaagaatatggaaggagggagagagatgacatgtgacattccttttccagctaacagatgtttggaaaaggacaagactgtgtttcatgctagatgctctggtaatgtgagcaagaacagcatgaagttaactacaaaacacagcagctgaacaaaagctcaatggattncgaaaggcagattgtgtatatggagaaaatccttcaaatc

SEQ ID NO: 3916 - DNA, 471 bp, Homo sapiens
  misc_feature 290, 299, 413, 424, 429, 431, 436, 445, 453: n = A,T,C or G
acttgccggcctccagtgtagcccacacctcctggactccccgtcgcctcccagttgcctttcagcacaacctccactgttctggagagtgcgcttaggcttggacttctccgagctccattgcacatgaagtcagtttcttcaaaagctactcacaccttctgttttctgcctgctgctttcccgggcaaactctctgagccagagctatggtgctggacacagtggtgcatctctctctggtgacacctgcacatcaggagctgggtgcttggtgaatggggcaaganccccagtgntcatcggctggcctctcttaacagggaaccccaccccatgagccagggaagggcggccgggccccagtattctcatgggtgctggactcaaggcagaacctccatcccatgagnggggcctgggnggaananaagancctcacctntaacccantttctggctgagcaagcg

SEQ ID NO: 3917 - DNA, 325 bp, Homo sapiens
  misc_feature 199: n = A,T,C or G
ccctggggacagagggtttcctccttctggacagagaaggcccagagtcggcttctgaacggatatccggcccgcaggatgcagaggaggcaaaggcctcattgttctttggggcctgcctgccccgcccccagctgtaggacactcgtggcagatcccgggtgactgaagacagcccatttccaggagtggggccttnggagcggagggagcaaggaaacggggctgagcacagacctggagtctgatgttctgagcataacactggaaggagctaagagccccaaaataaataagaccggaatttaaaaacgtcaaaaaaaaa

SEQ ID NO: 3918 - DNA, 124 bp, Homo sapiens
ctatgctatgtgctctctcctatgtgacaatgaggggtggctgtggagccacctaagggcctaaggagtatgtggtttccaaggtctctggccggcgtcacaggaagttaaacaataaaaacaa

SEQ ID NO: 3919 - DNA, 429 bp, Homo sapiens
  misc_feature 377, 393, 398, 408: n = A,T,C or G
gtgactgcgtgctgtagagaaagtacccacagctctgcagaatggtgccatgacaaactcaaagtcatcaccctcaactggacagtcaactcttttattgtcctcaagttaaagggtcgcacctctctcctcaagtccccttctcaggctcacctattacctttggatagatgacccaacctcctacttgactgagaaaaggtagccactagggactagcctcttgaatccacctacctccttacaatgattctgtctacacccaatcatacctctttccatcagtctccaaacataaggtgtcccttcttaaatccaagacaatctctgtaaacctgctccaaatcccctccctttcttccatggactttggctgngtttgaaaatcccttntttgncccgaagttnaaactttacctcgctatgggg

SEQ ID NO: 3920 - DNA, 386 bp, Homo sapiens
ggaaggaacatctgactcttggctcccactaagatgctgccagagcggctggtctcaaagggcaaaacaacagcccctgatggaaagtcttcacgacgcagcctccgaggtccttccgctcaaggctcacgtgttggagaagggcttcctgaagtagaggcccacagaaggcactacagtgtggtggtgaagagcgtggtttcagtcccaggcagacccagtcccagttcctcggctgccactcactggccacagaatgcaagcaagtgacttaatctctctggcctccagtttcctctttggtgagggtcacaggactcaccgcagaggagaggggaggagcatttgagatgatatactggtaatgggggtttccccaagggccc

SEQ ID NO: 3921 - DNA, 439 bp, Homo sapiens
  misc_feature 30, 31, 44, 48, 58, 61, 64, 83, 84, 92, 93, 94, 96, 105,110, 126, 128, 136, 144, 145, 150, 164, 171, 185, 202, 211,217, 221, 257, 259, 277, 305, 321, 349, 350, 354, 378, 389,393, 417: n = A,T,C or G
ctgctgatgcaaggaatcccctgggctccnnttcaaaccactgntgancaccccatantcntgngctgagaaggtgctgtcannctggactnnnanctggggtanccctntttttactgacccggntntggaaaanaatatggnncgggntccagtgtatgaanaacaagnctgctctttgggtnaggggtatcctcacctngcctaaggntggaancacncttgtctcccgcgtacatgcctgcccgagctcattntntccacttgggaaggaggntcccacttacaagggtcaagaaccttcnagcgcaagggaaactntcattcggggtgaagccactggaagccnnttcnactttttttttacccaacccccantggccaggggnaagnaaggttttttccttcccacatttnaagggctgaaggctagaattat

SEQ ID NO: 3922 - DNA, 614 bp, Homo sapiens
  misc_feature 19, 29, 53, 63, 227, 398, 422, 439, 454, 488, 496, 524, 529,544, 547, 556, 562, 586, 589, 599: n = A,T,C or G
tgaaacatttggggagggnggaaagttcnttaagaaaatccttaaccttggcngggccccttncaaaacacaaaacaaattttcttcaagggaattcaacaattttggaaagaacccctggactggggacctggccccccaattttggcttggaatggaaaaccaaactggccaagtggtccaaaggccacccccattggaaaaaactggacccatttggcttcaanggcccggcttaaggaaacacccaagcttggacaagggccctggtcaagaagtattacccgccccgatgggaaataattttggaccttctttccaacttcaaggtcaattggcaaaggaaagccctttatggccaaggccaaaaaaacaacttggttttccccaaacaagcnttactttgtttggggtaagggganaaggaatggtttccggntccaaaccgccaagnaagaaacaaggaaagggcattcttcaaacaattnggggacanttcaattttacccaagaaaatttgggtnccggnggacctaattgaaanggntttaatggncccccnaacggtaaaccccttccaaaaaanaanggggtttttnccaggcccaaaaggg

SEQ ID NO: 3923 - DNA, 433 bp, Homo sapiens
  misc_feature 358, 367, 388, 410: n = A,T,C or G
gactggccggaagaatttttgttgacccctctgagcaacatctagatattccctgccctctttccagccctttgccaaagatgtgacttcaagcaaggaggacccctcagtcctcatatctccatcagccccagcagggacacagatggatttatctacaacccatgctcaagtgctcgtggggagtaaggtgttctccggacccagcccctgagaagtcacgaaatcgtcagtctaggaggctgctgtcttaccatcaggaaggaaatcagcatcctgcatgcctgtcatttttcctggaactcatattttttcctgaaggacaacaaagtctggctgataaaacgtcttgggaggnatttgacgnccaaaatcttaacatttggtnacttaaaagggaaaaagggcanttttgtttctaagtaaatacata

SEQ ID NO: 3924 - DNA, 349 bp, Homo sapiens
  misc_feature 19, 20: n = A,T,C or G
ggaaaattctgtcaccganngaacatgctgcaatgaaagcgtatgccagccggaatacgaggtcaagagaataaagacatgtgcatgctccaggcacgcaggagtcttcttagtgaaggggatgatgctggaaggaggaaaagaagagaccagttcgggtaaggaggagtcttagctcagcctgctttcctaagagcgaagaaaaaaactcaaagggtttctacttggtatgacaaatctcctgggctgcccccacccttacctccaatagcagggaaagagacattttattctttccattgcttgggggactttgaataacaaaataattttgtatcccaaaaaaaaa

SEQ ID NO: 3925 - DNA, 115 bp, Homo sapiens
  misc_feature 19, 23, 34, 39, 61, 95, 100: n = A,T,C or G
actgatacatgctacaacntgantgatcctttgncaacntgctgagtgaaataacgccatnacactgaaaagcacaatctcagggcgtgatggtntttantgcagaaatatcccc

SEQ ID NO: 3926 - DNA, 136 bp, Homo sapiens
  misc_feature 18, 44, 63, 65, 67, 69, 77, 84, 87, 99, 100, 104: n = A,T,C or G
aattaccatttgcagtgntgctttctcacacaggttgattcaancattattcctgaacacccntntncngctacacntacctcntantttatttcacanngtcnaaaccattattctgccctttaatcacctatgg

SEQ ID NO: 3927 - DNA, 400 bp, Homo sapiens
  misc_feature 349, 364, 372: n = A,T,C or G
cacctcaggactgcagtgtcctcacggatgagaagactcacacaagaatcaatctctcacccctggacttcccagcctccagaactttttttgactgtggaggtggaacttttggatacaaaatgctgattatatgctgagaaaggataaagaaggaaatgtcttaaatagaagaaaacataagaagatagaaactgcagaggacagaggaccactgtatgccctgaagacatcactaaagtggcacatgaagcacacttttgaacactcaggaagaaattcctgacaatcaatggacacagaaaaacattattaagtaaaacttgtggtgactcttttgctaggcagnggggcataatgggtnaaaaattnggacttgggagccatttccaaaaaaaaa

SEQ ID NO: 3928 - DNA, 483 bp, Homo sapiens
  misc_feature 23, 390, 447: n = A,T,C or G
aagagataactgagtctcatcangcagaacgcgtattccatcacagacacacaaagaaggcagcagagggggctggagccagaagccagacgggcctccagagacgtgggttcccacagtggggtcctgtggctgcagcggaacaccccagaccaggagatggagaacacagctggagcggcagcgggaggttgcctgcctgcgtcctgacagcatcctcggcctccttcccctcaactggacacatgcaaaccgatgtctggtttcattttatccttatcaacagttagctgtctgtcatcagaagattaaacggccagaatgtgatcttcccgcaaattaaacccgcgagtgaaatgtccactctgcctgaaacaaatggagtctcanaagctgtggcattaaacaagaatcaagacacctactgagacctcttttacaggcggntatgatggcactttaacaaatactacaaactatctg

SEQ ID NO: 3929 - DNA, 434 bp, Homo sapiens
  misc_feature 28, 37, 42, 47, 48, 51, 52, 53, 55, 56, 75, 112, 117, 130,136, 149, 153, 155, 177, 191, 222, 243, 264, 267, 271, 276,287, 292, 303, 304, 323, 327, 344, 346, 347, 351, 366, 384,388, 413: n = A,T,C or G
ggcgcaggaggttgcagccaggctaacngaaacccanccctngccannggnnnannctggccattaaggagattncctgccttcactttagagagcggtagtgagagttctntgatnctcaatagggagngactcntccccaagccttnttgnancagctacagaccatagaccagntggacctctggctnccataactatttatgaagatcacatttctcngcgggggaaatgattcaaganattaccgtctggaggtaattnacntaanggccntttaacacttnagctntgacaggaaanntccttttccataggggggncccntaaaggactttcggaancnntacntttgggcccctttantttacataagggcattcnggcnaggtaaccaatggaaaactggttanaaacggcattttaaacctccc

SEQ ID NO: 3930 - DNA, 325 bp, Homo sapiens
aaaaggcaagtgacacacagaagggaagcaacttatccaagatctcaattgttagtggaagaagctggctgtcaacccgaagtcagtgtgagatgacctcagtgctttcttatccaggtcaggaaacactgggagattgaatttaaatttgaaggttgtttggtaaatatggaatcagagaaatcaaaatcacatggcctcaaaagatgatacttttgtcaagctatgaagcctggctcttttaacattgaagatataaagataaacaagatagacataaagtgtctggcctcctgaagttctgctagaagagagaagcatatac

SEQ ID NO: 3931 - DNA, 358 bp, Homo sapiens
ggaatgaactccattgcctttgtgtgcacgaagccggaagcacgaccactctttaccctcggcctcattacaagaccaagacctctggccccggcgcggcagcttcttcacctgggaatcccagcactttcggagggcccgaagcgggacgggatcaacctggaggtggtcagggagtttgaagaccagcctgggccaacaaggggacgctcacctaacctcatgaattacgcgtgtcgccctccccgagacgccacaaacgcaatcccctggggaagccagccggagacctctccctgcggtgctgtctcccccgtggtggaacggaagcccctaataaagccttgtctgggaaaaa

SEQ ID NO: 3932 - DNA, 393 bp, Homo sapiens
ttcagaggaagaataaaagtgtggccaaagccccagccacgggatcggccagtgtattgggcttccagcccaacacagccacagccacgtctggctttgcttctcacctctggagtcacagcacccaggccatctgcccaaggtcttactgccccctcttctggacagagaggactgagatcttctggtcccagaagactgcattaggggttccaaagattcttcctgcaccaggccagggttcagagtggaacaaccagggctcccaggatggaccggggctctggaaaaagatcccactccattccactcccaacgttgtacccagcctgagagcagcccccatcatgacatttccttattgattaaacctactgaactgtgaaaaaaaaa

SEQ ID NO: 3933 - DNA, 406 bp, Homo sapiens
  misc_feature 24, 35, 42, 43: n = A,T,C or G
atgcatgaactagtcactgccagnatttgcaccanttgcagnngtggtggtgaacaagagggagtccctacctttgggagctcatggaggcggagaaggaaccatcctgcagatgattcagaggcagactccaagccctggggagagtggagagggggccaagaactgctgggtcttggaaggcttcctggaggaggtgccgttgaacattcacccaaggcctctgggccccagatgtgagctgctggcacagatcagacctggctgatcccaaaactggctgcttggcaaaggatattggcaaactcaggcttacttgagctatttgcatatcatttgcatctatctgcatatgtggtggcacaagcctggtctcttatgcatttaaattgcaagttatttgtcc

SEQ ID NO: 3934 - DNA, 124 bp, Homo sapiens
  misc_feature 16, 24, 31, 55, 59, 81, 85, 97, 102, 105: n = A,T,C or G
ccacgtgaagtgtccnaatgtganattgggnggaaagccctttaaatgggcaaangctntgggcccccggcacccccttangggnaccttactaaantgganggnaaggcccccggaaaaaaaa

SEQ ID NO: 3935 - DNA, 149 bp, Homo sapiens
  misc_feature 18, 36, 38, 42, 44, 49, 51, 56, 77, 80, 82, 98, 115: n = A,T,C or G
aagggcggggtgatcacncccttatttgatcccatntnggananctggnanaatgncatactattgtagcttgcatncgngnaggttgggtttattgnactgacaccctaatctngcataatggaccctgacccagaaagacgaaaacc

SEQ ID NO: 3936 - DNA, 184 bp, Homo sapiens
  misc_feature 20, 30, 41, 42, 77, 91, 96, 102, 111, 123, 124, 131, 138,157, 169: n = A,T,C or G
cataccagcctattgatgtntattctcctnctcggtgcatnnaacttacattccatctgggactttagtgatggtcntaaccttttcaaantaccngggacngagaaaacnatggagcccacnnttttatncttcccntaagttatgccctcaaagncctatcaagggnggggtaaaagaaaat

SEQ ID NO: 3937 - DNA, 311 bp, Homo sapiens
  misc_feature 54, 90, 102, 112, 115, 117, 126, 130, 135, 137, 143, 145,172, 181, 225, 227, 237, 239, 255, 294: n = A,T,C or G
gaggtacagaaggtgaaacagaacagaagaagatcataaagaaaagggaaaacnagaagaagagatggtgatggctttaagcgggccttngcagcaaaaccnttttcccttnctngnttttttatnagangcccnangaagancncttccagcttttttaagggacttaaanaaaaacggnattgggctccttttgggacccccaccagacccaaaattctttgntngtgggaagtncntcctttttccttaagnaccatttggggaccaggtgaaaagggggtaaatttttcnccccctttaaaaaaaaa

SEQ ID NO: 3938 - DNA, 270 bp, Homo sapiens
  misc_feature 16, 32, 60, 80, 89, 105, 117, 120, 147, 151, 161, 198, 214,215, 219, 229, 239, 252: n = A,T,C or G
ttgtgggaaaccttgngctctccccacaaagnggggggcctgtgggcaaaaagggaatcnatttttttgccattccttgngcccacatntggggcaacttcccanttccatgcccanggnactgccaaaaaggccctggcccttttngggncccagccctnggggtggcttcaaaaccccctgcttcctgtggcaagncacccacccaactttnngggnctcatgttgnaaactttttncacggattcaagnaacacaagaccctggaaa

SEQ ID NO: 3939 - DNA, 342 bp, Homo sapiens
  misc_feature 22, 30, 45, 51, 60, 67, 74, 90, 91, 102, 124, 128, 134, 156,159, 162, 163, 167, 187, 197, 201, 209, 210, 237, 257, 261,279, 319, 323: n = A,T,C or G
actatactgcctgttgcctgcnatgataanacgaagaaatattgntctggnttcttaaangaaaacncactttnttgagacttgactcannaattacagatnaagagatgaaaagaaattcctnctgnctcagncatgaagccttcactgtaaaancanccnntgtnctgactgccccttggactgncctttttttnaagncaacacannttcactttggttctggcaacctgctgnccattcccacaagatggttngaangaagactaaagccgaggngcagatgacatggcttatgccatattttgattggggccanaatntaaatgtattacattgatt

SEQ ID NO: 3940 - DNA, 276 bp, Homo sapiens
  misc_feature 22, 39, 97, 99, 102, 112, 127, 128, 130, 133, 137, 138, 141,142, 143, 144, 147, 150, 154, 155, 163, 172, 176, 226, 249,252: n = A,T,C or G
cctgcatagctaccaggcatcngacaccgtcaccatatnctactttgtaaacgggttgtcacagatagaaaacctcacttatgttgcccaaggctgnantanaacttctagnagtcccaccttgacnntnatnttgnnctnnnnaanagntggnnttataagngtgacccantcangcctcgtaacttgaaggtatgtcttgtgaagaacattcatatcttctccnaacccatggaaacagggcatggnttnctttttcaatttggaacaaataac

SEQ ID NO: 3941 - DNA, 200 bp, Homo sapiens
  misc_feature 87, 141: n = A,T,C or G
attataaaagaaactgcagtccttccttcctcttcaaattcagcaatccgcggcaatcggatccctcttccatccctaacaagtacntttccctctccctgcctggcctccctcttccagcttttaaggaccctgtgagtngcgatgggactcatccagatcatccaggataatgtctcctctcaaggtcctggatgaca

SEQ ID NO: 3942 - DNA, 446 bp, Homo sapiens
  misc_feature 124, 343, 375: n = A,T,C or G
ttcggggaccagaacttgaaccgaggtcatgttagtgccctccacccccaggtgtaagcctggcttcagcttcctgggcaaaggctgagaccaagtttcccgacgtgaatgtggacgcagcggngaagaactgaatttgagagcgcatcctctgctttgtatcctccatccttacaacagcgtcgtctcctggagctctggacactccattaattagcacttgcatccccactctctgcatctgaataagttcagacccctccctccccacctcaggtcgctgaaaaataggtccccagcagcaccgtttcatccatcctatacatttcggcatgttcaagangcttacagaatattggtgagggttttgagatngaataatggcttttcatatttcctagaggggaccacataactcatttctaaaatacttagattagcaaaag

SEQ ID NO: 3943 - DNA, 132 bp, Homo sapiens
caggaaatggcaggaagcaaggaagggctttcgggggtgtggtacattgtactttgataccggccttgggttacacaaggtctattcatttgcccaaacttaagcaaatatttaagcaacctgtaaacaaat

SEQ ID NO: 3944 - DNA, 132 bp, Homo sapiens
  misc_feature 18, 22, 43, 60, 69, 79, 87, 99, 115: n = A,T,C or G
ttttatttttggggcagncacngaactgccctttgtggcctangtgggctcaaaatcttngggtttaanaaatctcctntgcttggnccccaaatttgngggatttacggccttngcccccccaaaaaaaaa

SEQ ID NO: 3945 - DNA, 150 bp, Homo sapiens
  misc_feature 26, 29, 38, 39, 52, 53, 72, 74, 83, 95, 111, 114, 121, 124: n = A,T,C or G
agaagacccaataaaccttttgagcntgntcagcctgnntaagaccactctnnattggccaatcctttcgcntnctaccctgnaagaaattactnactacccaccttggantantataccnccnttcttcgactatataaaaaactggta

SEQ ID NO: 3946 - DNA, 458 bp, Homo sapiens
gtggggtctttcaacctgaggggtgagatgaaagtccccaaggaccctcatcccccttcacgctcatggaagagtccaaggtgaagcagttgaaccagggatgccctgaccacaggaatgggggttctacacagaaaacaaatgtaaatctgtctactgaacaatgagatctgcagactccttctcccacctcaccctcaggaacagctgcctaggacaggagataaagactttcctatcttgggaagcacccctgactgaagacaaaagagaaagctcccggaagataatgatttggagttccccaacaaaggaccacggccctacccaggcaccccaccatgtgacaggccctgcccagacacacggagcatgcaaaggtgattaattgcctcacactcaaatatcacagaacatgagacatttgagaactgctaacacgagacacaaacagggtg

SEQ ID NO: 3947 - DNA, 256 bp, Homo sapiens
  misc_feature 35, 38, 59, 62, 63, 68, 74, 77, 81, 92, 117, 135, 136, 194,195, 196, 216, 217, 221, 223, 226, 231: n = A,T,C or G
actttggaaagtcgctaggtggcaactggcaaagncanaccccatggtcagtaggagantgnngcctnaagagnganttgncactttggaanagtaacagcttcttttgtgaaaagnatggacccctcagaaccnngaaatggggcctccgagcaggactactggttgatggaacaggaatgggaaatcctacnnnttatttgctacattttgggnngaangnatncgganaaaacttaagggggggtcaaaaccc

SEQ ID NO: 3948 - DNA, 247 bp, Homo sapiens
  misc_feature 27: n = A,T,C or G
atgaggttcctaggttaagagaagcangtggcctttgcccaaatctaccattcactagtaggcaccgcatctaggcccctgtggactgcatgctgtattctctcttccaacattcaaccaaggcttgtcctcctcagctatagaccaaaaccattttccttcatcaaaacgtgtctgtcctagctaattctgtcaaacacttttgtgctatgaagcagaattaaaactaatagtttaatgaaaaaaa

SEQ ID NO: 3949 - DNA, 437 bp, Homo sapiens
  misc_feature 353, 373: n = A,T,C or G
agaaaccaaccctcacaagctttcgtcgtacgatgggcctggctttactgaatcctatctatgaacctggaatctgacagagaaaccaaccctcacaagcttttgtcgtacgatgggcctggcttcactgaatctgcatcttatgtcacacttattgccagcaggacctgcctagtgacatttagctgcccttcgagtgggctggcaccagatggaaactggacataagctttcgtgagagatcgtgtgcagttcctgagctttgtgttaccagatactgtctcttctcagatgagggtcaaattgaaatttcattacagaaaccaccagtcgccactgttgaagttcagaangggtccacctagtaaggaangagaccactactacttctgctggccaccttggctagtcacaagacaggaggaaagagagaaagc

SEQ ID NO: 3950 - DNA, 130 bp, Homo sapiens
  misc_feature 28, 51, 66, 67, 68, 69, 72, 106: n = A,T,C or G
aaatatggctatcaggggccttacactntggggtacccttggatacccctnttaaaaaggggggannnnttnttttttttacccatttttccccatgatgcaattnacagcttacaagaaagaaaaaggg

SEQ ID NO: 3951 - DNA, 354 bp, Homo sapiens
  misc_feature 37, 147, 238, 303: n = A,T,C or G
gacctgaaactcaaagctcaaatctatcgccttccanatgctgagaagagaaacatctgatgtcagcttcctctctgttcctaacatcttcagttccccaaacagactttgttaacagttatcatacagctatgattttaatgccgngagatattatattaaaatgtaattttatgctttaactttgctctgcccagtttaagaagtaccaagtatgtatcaaggcactctgtactgngttggatggtagatgtttctcccataaatttggatatgaccccttcctttgagatactttttagntaagctaccagtaacccagtcacaatggcactttataagccggcaattaaa

SEQ ID NO: 3952 - DNA, 280 bp, Homo sapiens
  misc_feature 38, 72, 89, 124, 132, 138, 161, 167, 187, 208, 214, 227, 237: n = A,T,C or G
cctttcccccatttcttggcaacaaaatttaaataatnccacccaaatggcccttgggggggttacctaaanaacctcttattcgcacntttttggaagaacaaacctcaaaggtttggggggnccaaggcnaataanttttgggttttccctaatttggnaagaangggccccaagggggccaaanttccctctttcaatttggganggaagnaaagggggggatnaaggaactantcaaaccaggccaaaagccaccacgccttggaaccaaagccca

SEQ ID NO: 3953 - DNA, 414 bp, Homo sapiens
  misc_feature 359, 373, 396: n = A,T,C or G
gtgaaactggaacacagagacaaagaaaagtcaacaaaggctctaacatcaacatgaccttggataaggtgtacatttcatcaggacagatgactcgaatgggtaaacttagtcacctcatcagcagccatcctggagaacagagcactgggcttaaaaatcatttcttccaacggtctccatcctttgtccctgaaagaaaattcatgctcccaatctccaagcactctggctatctttcttgctaaaaagaaatctgtttgggatgccagtcattaacctaagagagctatgatgtgttccttccattctgggctccttgtgggctaagcttgagccacaagtatttggtttaaggnccttgtccggtctnatggggcactggcttaataaaanggaaatctacaaaaaaaa

SEQ ID NO: 3954 - DNA, 355 bp, Homo sapiens
  misc_feature 26, 31, 37, 41, 49, 61, 145, 244: n = A,T,C or G
aatatagcaagtcaacaacacacaanactgngaaatngtanctgggcancaattcttggancttcacttggcaaccttcttggccttcccaaaggtttcaaagccaatttcttccttggccttcgggccttccttggaagttaanccttgccgaatgcccacccacccccttgggcttaaacttttttggtatttttggtaagaagaatggggatggggtggtttcaccatatttgggccaagngcttgggtctcaaaactcctaaacctcaaggtgggatccacttccccttcaagccctcccaaaaagtggcttagggaattacaagggcggtggaagccacccaaaaaaaaa

SEQ ID NO: 3955 - DNA, 175 bp, Homo sapiens
  misc_feature 46, 124: n = A,T,C or G
cggaaggggcaggcccagtcatgggcatatgctgctccacgtcttnccaagttgacccaaactcctctccacagcgtccccactcgcatctgttgattcaaccaacctaaacatctgtcatttncagaaccgggcatgctcactcatgctggcttcttgctttttactcaagctg

SEQ ID NO: 3956 - DNA, 463 bp, Homo sapiens
  misc_feature 403: n = A,T,C or G
aactattatcctccatttacagttaagtaaactgaggccctggaaaatgaggcactttagttttaaaagctgctaaagtctattgctacatcatgcagtttcagttctggactccacattttgctagggacattaccaactatccagaagacagagatgggaaatgtaaagggactgcaaaaaagccatgttacctaaagaaccgtgaaagaaactggaaataatttccttagaggacagaagattcctaggaaataagacaatgaacaatgagtgttggagaatgtcctttcctgcctcttaatcattctgaatcgaaactaatgataaacttcaatcaatgacattgaggggatgggtaagggataatataaagagtcctctatgcatgctaatttgttgntacatgtgacctaagatggggggttcttgctttaaagaccttactaatcattaaaaaaaa

SEQ ID NO: 3957 - DNA, 560 bp, Homo sapiens
  misc_feature 466, 505, 525, 533, 538: n = A,T,C or G
gtttgacaaacgctctttcgaatccagaaaagtcaagtagagaaggaaagtaaggggccacttactgtgcctcgaatcacaagaccgcggtggaccagcctggttaagacctgtggatgtcttcagcaagaaacttggagaggcccctaaagatatcgccagagagaaaacaaagaaagcttcagtcgctccttcctaagctgtcacgactactcttttaaatggccccatgcttggatttctgtcaccacgactgggggagcctgggcgagtgtgctttccctcactgcacctcccatgggagcccaggctgctgcgccgtcctcagactgttgggatgatgagcggacggtgaactcccaccacctgcgcctgtgaagggagctccggttgaggggctttgctgcttcgggtcgggggctggcgtaagtcttgtggtgggggagatggggtggacttggggcanaaccaaaccttgagccccacgcccaggatgaatggaagnggcccggaaagcattctgantttccggnctggnggggctttcctttcattaaaac

SEQ ID NO: 3958 - DNA, 202 bp, Homo sapiens
  misc_feature 19, 25, 26, 31, 44, 47, 49, 50, 54, 59, 60, 70, 120, 165: n = A,T,C or G
ctgtcctcagccttcaccnaacgtnntgaancatcctacctacnctntnnggangaggnngaacactaangggatgaggaaggacatttctaggagatcagtcttcaagattggccccantttccccagagtaggaagaggcaggaagccagagcacatgttctnttcaaaaaaaaaagtggtgcagtggcctaaaaaaaaa

SEQ ID NO: 3959 - DNA, 550 bp, Homo sapiens
  misc_feature 370, 372, 375, 382, 392, 426, 453, 456, 481, 514: n = A,T,C or G
atgacgtaactacggctttgggatgttacgcaacgagtaaggccttgtgagtcttcacagaaagggactggcctggaggctccgagcggtcagctagttcccgtcactgttctccccgggaagctgtggatgggcagtgacccaggcagggaaagggagatagagatgaatctacaaaatggaaaaagtgttgaacttgggagtcaagagaccaggattctagttctgatgatgcccttcacataccgaatgccctggggaagccgcttcccttctctcaaccttgggttctccatgtgtcaaattaggctgtggaaaaagaaacactcatctggctgaacggagacatgagcctctgtaaactgattcntnctncacaaangggccctggncctcacaagccccatcctctttcatccttgctgnctgatcctaaggaaactttgctctggnggngcctggagctgggatgtatgccagncatttgaaaccccacttttggggaaaaaaccanacattgatttttactctaccatttggagaaaaatca

SEQ ID NO: 3960 - DNA, 215 bp, Homo sapiens
  misc_feature 120, 130, 141, 163, 168, 176, 185: n = A,T,C or G
gtatcacactcaagagaagtgaagacgcccacaaagggctctgcagcagcactgccggtgagagctgcatcccggggatgcatggactggcctgtcattccagcacctttggaaggccgnggtgggaaanattcgcttggncccaaggagttcgaagaacaancttgnaacttcanaaggtgganaacggccccccccaacaacttcaattaaaa

SEQ ID NO: 3961 - DNA, 108 bp, Homo sapiens
  misc_feature 16, 19, 33, 45, 68, 78, 92: n = A,T,C or G
ctctactgctgagganatncatgcttcgagacnggacaagccagngactttttctatagaaagggccnccgactccanttctgaaaatctcngcagctttatattgac

SEQ ID NO: 3962 - DNA, 371 bp, Homo sapiens
  misc_feature 25, 28, 32, 61, 65, 70, 147, 170, 172, 210, 212, 219, 221,242, 245, 262, 265, 266, 281, 292, 300, 306, 309, 318, 322,323, 324, 333: n = A,T,C or G
ccgccattgaacaactagggattgnacncttnatttacaaccgcttgcaagagataggctnttcngaatntgactgcgcacaaaaaacaaggcggattgctatggtgccgacaaaattacagggtgtcttatgggatggacgccccngatcttttttaacaaaaccgccncnggcttagtgccctgattggaactgattgacaaccttangnggctatngnggatggtccccactgtttggntcnttggcctgctggacctngcnnatgccactccaagcntgtttgggggncctggggntccttntgnctgaggctncccnnncaagaaatnctggggattttagcttgctttttttaagagaaagggat

SEQ ID NO: 3963 - DNA, 449 bp, Homo sapiens
atgaatgaaaaatattactgaatcagagaaactaaggttcagagacataaagtcacttgctgacgtttatttaatggcaaagccagaccccatgtctccaaatcctgtgggcttttccctcacgttgcctctccacaccccagtggccttgatgatgctcaagttacaccatcccttcgatctcctttctccagttgctgtcagtatcggaagttctccctgctgtctgccctcaaggcttcccactgtactgccctggccctgggctcacctgagattgctggggaaaagaaagggtcaaccgggaggtttagacacgtggagaaggagtgtgcctgctctaccagttggaactgggatcagaagtggagctgaggaggctggtccagggagaatgcagtgctaagagacgatgctgctgacaagcccggcctcaggctggagtcaga

SEQ ID NO: 3964 - DNA, 285 bp, Homo sapiens
  misc_feature 26, 28, 31, 34, 39, 44, 86, 108, 117, 124, 139, 162, 166,171, 179, 186, 198, 225, 226, 265: n = A,T,C or G
cccttggtgggcccccattttggagngnccnacntcttntggcnaggaaaggacccattttttcacaccctcttttgaatacccanttttcaaaccccattttccttnggccccttnggcccancaaactttgggtcantaaaaaaaggccttaaccctttngacnttttntaaaaaanaaccctnggatttgaaggnaaataaacctcccaactttacttgggnnttgggcccaggccttgaagtttaaataaaaaaacttctnttccttggcattaaaaaaaa

SEQ ID NO: 3965 - DNA, 117 bp, Homo sapiens
  misc_feature 23, 34, 35, 49, 63, 88, 101: n = A,T,C or G
ttccacatgaatgcaataagtcnaagggagcatnntgaggcgcacgagncggacacgaacgtncgtgctaagtggcactagagcttcnagaccaaaacganacgctacgcgatatga

SEQ ID NO: 3966 - DNA, 328 bp, Homo sapiens
  misc_feature 25, 39, 53, 61: n = A,T,C or G
catcttttccctgggactggctttngggctacttttagnaagtcccaatcaangaactagnaaagtattgaaaagccaatcaccaatttcccaacaaattaaggatccatcattcaccatttgggttggggtcccttgcttgctaaagaaattccaaaactacaaagggggaaaaaaggttaaaactcaagctaaggatttcccttgccttgctcaaagaaccacaaaccccagtggggcaacataaattcttgggtggagggatgaaaaaaaccgaaaatctatacttgccctttggaggaaaaagcattcattgccaaaaaataaa

SEQ ID NO: 3967 - DNA, 126 bp, Homo sapiens
  misc_feature 25, 33, 41, 42, 51, 52, 79, 90, 98: n = A,T,C or G
ccccctgtgtaattcccacactttngggaaggntttaaggnnaggaaatgnngggcttttaaaggccaggaaggtttcnaagaaaccaancctggggnaaaccaaaagccaaggaacccccttctt

SEQ ID NO: 3968 - DNA, 120 bp, Homo sapiens
  misc_feature 46, 99: n = A,T,C or G
gaaactttttcaagctttgtgactgagagacagccatccctttcanctgggtgagctttccagttgcatgagaaagagcttcataagaaaccacctacnctcttcccatccaaaaaaaaa

SEQ ID NO: 3969 - DNA, 380 bp, Homo sapiens
  misc_feature 73, 365: n = A,T,C or G
acttctgggggagctaccttgctttaaagtcaagaacttgagggaaaaccactttttgggccaggtttggaanggggaacccagcccaaaagaatgggtggaaaaataccccagggtattttgggccaaaagggaaagaaaaagcaatttaccaccttcttcaagcctggagaaaaaacaaagggaagaagggatggtttcttttggttacttgggattccaagtggaaatgcttgtggggtcatgggggaagggcttggcccaagactttgcccaagtggaagaaaagtcttgggccatcgggtaagaaggggatgccaagccacttaccaaccacaagtatgggcaagaagaaaagtaagcangaagaaaagaaaata

SEQ ID NO: 3970 - DNA, 471 bp, Homo sapiens
  misc_feature 283, 285, 340, 347, 358, 365, 372, 377, 378: n = A,T,C or G
ggtggagtctccgggaggatggctgtggaagaactgccaattccaagggcctggtcaggcagaggcattcttactattccaaaacaaggaaagggtaaaaccaagatgtcaaaggccccgctggtgtggaagcaaatttctgcctccaccagctggatggctgctacccctgtacaggttcctaacactggaacagggatcaacccaagtgcttggggctcaccatgtcctcctccccagccaggacagcaagtggaagacacaggcgagctgaaagaggctnantgtgtgcccagccctaaccccctgcctcattggcaccaggcacccaggactcctnagaactnaaagccagggnttgggcnaccctcnttcgnngggctccttgaaaaggatttatagggacttgcccaggaggcttttgggccattccaggggacattgttttgggggaaaaaaaggacccaatat

SEQ ID NO: 3971 - DNA, 175 bp, Homo sapiens
  misc_feature 54: n = A,T,C or G
ggattataggcatgaaacactgtgcccatcccatgttatcttattgttctattntttgtggctatatgaggaagccctctcactttctccttaaactacttctaacccacattttagtagattgattctgcctctgtgatctgaataaaacattaagtagtatctgaaaaaaaaa

SEQ ID NO: 3972 - DNA, 132 bp, Homo sapiens
  misc_feature 22, 29, 78, 85, 110: n = A,T,C or G
gaagacctggctaatacatgcncccgatnacgaattgacaacttggggatatctttcatggcccgttaccgaggtaancatatgnatgtttgttatacaaaataaaattntttggcgggcggggcaattaaa

SEQ ID NO: 3973 - DNA, 331 bp, Homo sapiens
  misc_feature 42, 46, 47, 48, 51, 54, 59, 66, 76, 99, 104, 108, 115, 116,119, 121, 124, 128, 139, 143, 151, 197, 199, 202, 211, 228,242, 244, 311, 315: n = A,T,C or G
cagagaccgacaatgcaccaagagaagatgatgctaataacnacannnagnacnccctntgaaaanggagtgactngtatgaaacatcttcaagccaangaatngttntggctannccnanccntganaaaggcctggnacanatcctgcnctaaaaccttcaaagaaatcattggctgcttacatgttgattttgnanttntggcctccngaactgtgaaaaaaaanttcaggtggttttntncatttcaaaaaaaaagggcggggggggcccattaaggttgggctttaaccaagggggaacttttttnaaangggggggcttcccccc

SEQ ID NO: 3974 - DNA, 119 bp, Homo sapiens
  misc_feature 88, 89, 93: n = A,T,C or G
cgctaaaggtaaattggaaaatgcagaaatggaaaggagaaaagagcgcaccacccaaaatccttatccttcggctgggctgcggtgnnttanacctgtgcactttgggaggcccccgt

SEQ ID NO: 3975 - DNA, 247 bp, Homo sapiens
gcaggctctgaaatcgcccacgtgaagacctgagaggccggtggacaacagtggtggagcagcatggactctagagccagcctgcccacctccacatcctaagctgtcatgcaatcccaggcaagtcactcggcatccctgagcctcaagcctcatctgcagaacagggtgatgacggtgcctgcctagtggggttgctgtaagcaaatgtgaaagatgtcaaaaataacaacaacaacaacaaaaa

SEQ ID NO: 3976 - DNA, 124 bp, Homo sapiens
  misc_feature 22, 23, 25, 47, 55, 56, 62, 63, 68, 70, 78: n = A,T,C or G
aagtgtccagcaacagatgagnngnataaacaaaatgtcgagattanatatggtnnaaattnntatanantcctatantgtgaatgccattctggcacattctacacatggacattgtggcttt

SEQ ID NO: 3977 - DNA, 221 bp, Homo sapiens
  misc_feature 27, 28, 31, 55, 65, 69, 131, 172, 178, 179, 192: n = A,T,C or G
tctgtgcctctgcttacaagatgggannaancatgagaaattaatgagaaattgnttcccagccnaagncatctgacaaatcgcaatctgaatatgaagtgtttgggacatttcacgtaagctccacaaangtggagctcttacctgttgtcagtcttgctcattgtaatantcctanngatgagtatatantcttaataaatttagctttaataaaaaaa

SEQ ID NO: 3978 - DNA, 313 bp, Homo sapiens
  misc_feature 30, 167: n = A,T,C or G
atgcctgcaatcttcacttgcatcaagatnacaaaagtaaggaaagactgaggaaacatgctaggttgaaggagactgaggacatataaccacacaatgcaagatactattttgaattggatactggaccggagggaaaactattgctattaaggacattactctgncaattggtaaaatttaaaattggtaaaatttaaatatggactgtgggttagataacagcattttataaatgtttaatttcctcattttcattattatagtatggtggttatgtagaaaattataaagtgaatatgacaagaaaaaa

SEQ ID NO: 3979 - DNA, 115 bp, Homo sapiens
  misc_feature 20, 41, 80, 81, 87, 100: n = A,T,C or G
tcatttacccctcttgcctncctgggaagacccaatttgcnagtaccaaaattgaaattggggtccgggctctaaccccnntccccntttggaaaggttnaaaaacttggaggtt

SEQ ID NO: 3980 - DNA, 603 bp, Homo sapiens
  misc_feature 291, 459, 556, 567: n = A,T,C or G
aattacatttccagtaaaactaaagaacattctcatctttgattgactatttgaagttgcacagccccatagaggattcgtttgtaggcttgaagaaaataagcactggaacaaataaatgcaaagaagctgcagcttgcatcaataagcacaaagatgacaacttcagaaagcatctgggggctttccagctggggtatgtttggtgagaacagcttctagatgtccccatgtcctcatacaggagatgcctttaggtcaagtgaccttggtctcctgtctattcaaggntaaatcctgccaggtcacaggaagcaacttgcaagagaagctatccttaaacttcagcattgctcccacgttgcagagccatgtcatctggatctaacatctgcttatgggacctacttcttaccaagcaatctgggctatcttctttcatttttcaaggtatatcanggggatggcaaactacagcccacaattaaaatacagcctaatgcatgggttggtggttttttttccccagccccccaaattaaaaatgggtttacantttaaaataantggggaaataatccaacccggaaaataagtttgggg

SEQ ID NO: 3981 - DNA, 141 bp, Homo sapiens
  misc_feature 18, 44, 47, 53, 58, 59, 65, 77, 85, 90, 104, 106, 113: n = A,T,C or G
cggattattcccccccgnagctacttacatgcccagacccttcnttnatgacnccctnnctctgntccataaacatnaagggccntatgnggaaacttggagtngnttttacnggcgacttcttttttttaagtggggggg

SEQ ID NO: 3982 - DNA, 425 bp, Homo sapiens
gaagagagaaagctgagaaggaatgaatatcaacaaggcaacaggaaggctgagcaaagaagagaccattgcggtaacaagaaagagagaggggaatcttaaatcaagacctcttgactcctctgtgctgttaataggagagatctttacggaatagacttggtgctcttctgatacctggattctagccacctctctctaagataccctaatggctggcatatttacagcacagatcatgctagatgctacattgtttctgtttttacgtgcctaactcagctgaactatgtgtgcatcttaaggcccaggccaggtcttatctttgttggtagccccagatcctaacccaaaccctaatggaagaagaaatggaggaattggagagaagatggagaatctctatttccccatcaagatccccc

SEQ ID NO: 3983 - DNA, 185 bp, Homo sapiens
  misc_feature 21, 24, 25, 39, 47, 63, 74, 99, 104, 110, 114, 118, 122,125, 164: n = A,T,C or G
ttacaaaatggccaaaacccnttnnggttttacctaaanggcccttnaggggacttttggggnaaaccaaaaanttcttaaacctccaagggcttgggnaaacnttcctngggncttntttnccntggaacccaagaaaatttaaactttcccttggggcttgncttacttttcttaaaaaaaaa

SEQ ID NO: 3984 - DNA, 397 bp, Homo sapiens
  misc_feature 51, 272, 299: n = A,T,C or G
agtcacttggaactcttctgtggcatctgaagcagatggaccgaagccaanagggccgagagtatctcagcacctagaaatggacaaggctggttattagaacaaagatttcgcaggtggtgagtctcaaaggcgaagctgaatgatttgatatttcatgaaattcagaaataatttggagcttttcaaacctgggatatggaagaaactgacactcctgttctctgggaaggatctcccattaaccagtcataatgaagtaagaacaagangatggggaagaggaagtgtaaaaccgnggcttaaatttgccaaggataagctgagtgtacttcagcagtcatttgcacagaatccttatcctaattttaccacccagggaaaactggctggacag

SEQ ID NO: 3985 - DNA, 426 bp, Homo sapiens
  misc_feature 90, 96, 109, 110, 111, 112, 113, 118, 119, 130, 131, 144,146, 154, 157, 162, 177, 204, 206, 220, 224, 250, 257, 258,268, 272, 275, 299, 303, 305, 318, 325, 390: n = A,T,C or G
gttcatatatttcaagtgctttggaataaatacttgagatcaactgctgaacaaagaaaacggaacacagctatgaagccagcaatgganacccanggagccagggggnnnnnccaanncttcaacccannttcggcttcccananaagcactnctncccangggggccttacgctnaagcacccacacaccaagggcttattnanggctttggcacganccgnttcacgcacacgccagggtcttgttnggggctnntgtacacganacgnttnacgcacacgccagggggtcttttngggntntttgcacaagacnctttccncgcacacgccgtttgtacactttacacccaccaatcaagttcacttacactaccccaagttgggnaaaaggccttcccgggatggatacctgaaaaggccg

SEQ ID NO: 3986 - DNA, 426 bp, Homo sapiens
  misc_feature 383: n = A,T,C or G
gagcaaaccccaggaaagaggccatcatgccacctgcagcaatcaaggtgacagagaaataccgagaggcagagaacaagaaagctggacaaccagaggccaagcccaaaggtgtcccatgtggccaggccctgtctagagtgacttgtgtgggccaagagccttcactgtccagagatcagaaaccacaccccagtggatgactgggagctgcctgcccaccttaccttcaggagaaggccctcctgatcccacacctgctcttcaatgaccaatgttgctcagccaggcccagggggaagccaggaggaccctagcttccatggctaacctaggggtaggcccagagcagagaagaggggtgcacgcccaagtgggccctnagaaccccaaggaaaaggaggggtcctcccctgtgccccaatg

SEQ ID NO: 3987 - DNA, 244 bp, Homo sapiens
gctcctttgcgaggtgcctctgcagcttcaatcatcaagagatggagtctatcttcacatctgccaaatctggactggcctgggatttgctttgaccaacagaatgtgctggaagcatgttctgagcctgggcctcaagaggtctgcagtgactacttgatctcttagatccttatccagtcaccgtgtgaacttgaactgcatttttggatataaataaaacgacataacgtggaaaaaaaaa

SEQ ID NO: 3988 - DNA, 405 bp, Homo sapiens
  misc_feature 350: n = A,T,C or G
gaagtattacctagcacctatgtcgggtcacgcatgacttgccgctgtttaaggtactagagagaaaacgctgaacgagtctcaagtccccagtgccatgaagcttagaatctgatgacaacaaggacaaggacaataacaatggctgatataggcagctaacatttataagaacatttacaaggtgcctcacactgtcctaagtcgtttgggctagttaagcggaatcggcacaacaggagtttacacttggagctgcttagtctcagtgcccaaacggcgttcaaacattgtggacgacagttctccactcttgcatctccacaggccagattcttagaacccatcanaacagcctcaacatatcacgacaggttttccttcccttccccaagttccaattca

SEQ ID NO: 3989 - DNA, 269 bp, Homo sapiens
  misc_feature 21, 36, 38, 41, 57, 73, 95, 103, 116, 118, 134, 158, 160,167, 174, 214, 218, 219, 237, 238: n = A,T,C or G
gtgtcagggagcgaatgaggntcaggcggagatttnangancagcggccagactatnaccccgctcatacggngtgcgtgcacccctgacagctncggaggcnaatcaaggtgccnanatcttggggcccattngggacttgcggtcccgcgagggcngntcttggntggagcntatttggggctggccacagaagtgcccaatgaactctaangggnnttttttttttaaaggctnntttttgaaaacctaaaaaatttttttttttc

SEQ ID NO: 3990 - DNA, 202 bp, Homo sapiens
  misc_feature 21, 26, 35, 40, 71, 87, 99, 107, 108, 109, 112, 127, 128,137, 138, 147, 152, 158, 168: n = A,T,C or G
attttccattgacaggacacnttttnttcaccctnttaanacccaccaaatgcattaaaattggggctcantgccaaccctcttgancccaattttacnaaaaggcnnnaanttggcctttttttanntaggggccnngggccccgnggganaaaaanattcttccgntttcccccagggggggggtttttccccaatttcc

SEQ ID NO: 3991 - DNA, 297 bp, Homo sapiens
  misc_feature 28, 29, 42, 44, 50, 54, 71, 74, 102, 106, 120, 121, 146,158, 160, 167, 181, 189, 190, 194, 195, 198, 200, 201, 202,272: n = A,T,C or G
tccctgacccatacacttggaaaggccnntcaggggaggacncncaaatnttcntcctgaataattccatnaangtcttactagagccgcgcatggattgantcantacctttttgcatnntaaaaaccacactttcattgtctgnacctggcttgcngnggatggntgatactgagaacncctgggannaatnntgncnnntgtgccgagctcagatgtcttgcattaccttcttatgctcctatcctgctgctaaagcgtgaacctgttntttttgacccttaaccttggaggga

SEQ ID NO: 3992 - DNA, 123 bp, Homo sapiens
  misc_feature 88, 98, 101: n = A,T,C or G
gagctctttggcaaatctactctgtataccaactcagaaaaacagggaaaaaaacccccaatctggtctttctcattggggggcccantaaaaagtcnccncgatccttttttgaaaaaaaaa

SEQ ID NO: 3993 - DNA, 510 bp, Homo sapiens
gagtgaacctgtgctcatctgtgctcccgaaagaatggctgcttgacaagctcatcaactgctgtaagaggcatttttcctgctgtgtgtctaagaaaagcaccaaaaaaccaccatgactctttccaagggagaaatgacagctccgtctttgacctgaatagcatgaaaacaaggcagtctgatccagagagctgctctgtcatggagagaataacccttggggacaccaagtacccaaacagcacagcacatgaatataaacaatgaatacccaatggctataggcctcctttggcttacagcccctcacagcactttaagaggtgaaaatagaactggaagacgccttagggatcaccgggcacaacccccgctttttgcagataaggaaactgaggctagttaacatgtctattaaagaagctggagcaggggtgaaagctagaaccttgatctcaaactctcaagcttctggtttattttctctatcaccctgcaagcccagat

SEQ ID NO: 3994 - DNA, 424 bp, Homo sapiens
aaaggtcactgaactcgtcttttacccgatcatccgaggttgaagatggaagctgcttctcacccaaccgccctgagaaacaaagaacaaggctcctgttaccaacacggagcacagaaaggtctcacctgcaaggaggcatgattctactattgatgactagaagggagactggggtccctgaccctcaagttctccccaccgtggccccatccccaccaagggtgctatgcagcctctgatcctgccctgccagcccaacgtccagaagcacacaggcagcaacaaagcattaaaacccttcaggaacagcagaaccagaaagcccagtccttccactgactccgatccagtccttctaggacagcctggacttggtggatgttcttgagacatttaaaaaattactaggccaggccggaag

SEQ ID NO: 3995 - DNA, 120 bp, Homo sapiens
  misc_feature 17, 20, 41, 51, 55, 73, 75, 76, 83, 90, 102: n = A,T,C or G
taatataaaatattaancantttataaccttttgagcaggntcagcctggntaanaccaagctgaattggccnanncttttgntttttancctggaagaaanactcaaaagccacctgtg

SEQ ID NO: 3996 - DNA, 491 bp, Homo sapiens
  misc_feature 327, 336, 354, 360, 366, 392, 408, 415, 424, 427, 463: n = A,T,C or G
gggagcggaaggccatggtcctcccagctcaacttcctactcaacaagtggccggcaaggtgtgagtcagcctgttgttgctggacgggtctgagagccatcgctctgcgtggtgctgacagaggacccagaagaagaaggaaggcctcgcccctgcaggcccagatgctcccagaggggctccattgtccccacactgtggccagagggagccgtcataaaagctaacgtgtcctgctgaacagcctcggaagctcccgctgaccatgacatcgaagccagggtgcccacgtgcccttccgggctcacctcccagcccatctcttnccactcctnccccaacccataccccanggggantcccanttcctttaacccaaccaacccgggtngagactggcctggtgntctcctntggggccanaanaaagggcctccttgaagctgggttcccttggtggtnacccttcccagcccttgtacttccccca

SEQ ID NO: 3997 - DNA, 350 bp, Homo sapiens
atcacaggaccatcagaacaaggatgttttagcaggaggccaccccgacacaccacgcagcacccgcagtcctgccccttcccgagtctgatgggtttcagcggaagggcagtcctggagtctcacagcgccagtctgcaccacgtgtgaaggggcctgaccagctacagatatgctcgcttacagggacacccctgcaaggagggactccgaggaaataagttctttccactctctccagacactggtctattttcttagggttttgtggatctggctcccaacagtcctttgtgatatctaatcctagtatgtaaataaaggcattgtggtggctttggagtacatgg

SEQ ID NO: 3998 - DNA, 336 bp, Homo sapiens
  misc_feature 35, 41, 47, 57, 59, 60, 66, 89, 107, 115, 118, 125, 129,131, 133, 157, 170, 182, 190, 194, 230, 239, 240, 249, 261,270, 276, 279, 289, 295, 299, 313: n = A,T,C or G
tacttgacgacttgaggctgatggtgtttatgcanagaaancactgngattaatatntnncactgnttgatattactgcctgcgggcantataataataaaagcggncaaaaagngtnttttganatangngngaaaaaaggttttacagctaaaancgaccgataaatnccctttataatnattaccgngggnattcccaaagaaaaaggtattgccccccgggggggnattttttanncttataacncccccccggggnagttttggnctttanccngaataaaaanggggtntaanatggtaattcaggncccctttggaatccaaaatggca

SEQ ID NO: 3999 - DNA, 363 bp, Homo sapiens
  misc_feature 18, 71, 72, 74, 78, 80, 89, 91, 116, 121, 129, 135, 136,137, 153, 219, 221, 223, 258, 261, 266, 269, 270, 276, 289,298, 300, 308, 311, 314, 334, 342, 343: n = A,T,C or G
gactccttttgggtcctngtacttcagacatccactgtgctcgccaccccccgttccctgggtagggatcnntnaccngngcgcatggngnaaaagaagagcagccagaataggcncaggntgggcgcnggcacnnnctacggagagggcctngaactgcacgagattccaaggcaagccggcaggttgttctggtcctgagagtgctgaagggttggncncntcctcctgcccgggccccaggacggaatagtgccncgngcttnatnnttgatnacaggtgctgcangctaagtcngnttttgctnggnagnaattgttttttttttcccgnaatttggnntttttggcaaaatcttattt

SEQ ID NO: 4000 - DNA, 480 bp, Homo sapiens
  misc_feature 395, 419: n = A,T,C or G
gcaaacccgctgcgcaccttcaacatgcagctggtgccaccatggcagcaaggtcttcggactcctttcggctcctagtacttcagacgggctctgccctattggcacatctgtctccaccagtagacttaggagagtttcagaaagacgagaggggtgagcagaggcaagaactggctaggcagatgggttgtgggaaggagagggcctggaactgcaggagattccaaggcaagagtgagtatgatgtaaagttggtggggtcagcagcggccaactctggcctgacactgcaccagggagaaaaagcaggctgtggcattaagaaaaccaaaaggtaacacccaatgtcggtgctgctgggaagaaatgggcatttcacttgtaaaccattntaagggaaaaaaaaaatttggttntactatcaaaaagcttcaatttctcaggccggtgtggcggctcatgcctgtaatcctgcaa

SEQ ID NO: 4001 - DNA, 304 bp, Homo sapiens
cacgaggaagccagagggagaggatggggtcggcttcgccgagggtgcgcaccacggctctgtcgccatggtgacccacgagcctggcctttgcaggaagccccaggcctgttccaccatctgtacatgctgacgccagctggtctggcctgatgctccaggtggacgcttcgttcttggctcggcccgcggaaaccatgaaaagtggaggtcctgtgtggggcatctgcaacataccagccacggagctcggggctcacagtagcttctcagtaaatactgaatggacgcctggaaaaaaaaa

SEQ ID NO: 4002 - DNA, 470 bp, Homo sapiens
  misc_feature 355, 430: n = A,T,C or G
acataaagcccctggcctatgtcaaatgtctgactgatgctcataatacgataatggtacttctgaatcaaaactcagcgttgcctccaagaaacacagcccaaaaggcaaaattaaatgtgcagtgtctaaatggatctcgctgatcattcttgttttcctccaagaacctgaagctatggtttatcgttttcctgtggaatgtactgtgaaataccaaactaactttaacttatctgttaccttggggctttctttactttactagagaagcagcaggatataaagaaagaattctggaaaagtataccacctagaactgtttcccaagccctctttcgaaaagaaatattgntatgttcaaatatgtcagagaaataactgattaaacaaagataaatggttttggttatatgcttggttgaaatgnctcaaagattttcttattataatggggtttgggaaatctg

SEQ ID NO: 4003 - DNA, 581 bp, Homo sapiens
  misc_feature 459, 499, 525, 533, 546, 548, 556: n = A,T,C or G
atgtttccactcacaatattggtaaatgtagagtttgcctctactgactgtcagctggacatcttggttaagactcagactgcctgattcttctcttccacttacaagccttgggaaagtcacatataaccatgtggaacctccacttcctcacatggaaggtaggattatcataacaccccctcctagactggcatgggcagtcagcaagacaggatttcgcactggcccagcgtgttgtgaatggctgtcatcagtatcgtggctgtaaccgtgacgtcatttctgacttatgatgttagagatcaggctgtgctaggcctggtgtctatgaagtcctgaggcagctcaggggtcagagggccttgaaaaagtctgtggctaaggaatcactccttgaggagaggggaaaataattgtatactccggaaacctggcaacaaagccagggctttcgtngagaaaggttgaagtggttcataagaagtaccccaacaanggggttgaaaataagcacacccagtntggattgnatggttaccaagntnccactagntcacatgcatttactcactgaatcc

SEQ ID NO: 4004 - DNA, 378 bp, Homo sapiens
attgagaaactctcgagggcaagctgtgtgtcacactcatctatcgctggcacagagcaaagtgtctgacacatgaattaacaacaacagaatgaagctctggtagaatgaaatggaatccctgctgaacccagaagcgaaagaagttagagggaacaggactggagcctatgaaaacatctcagcagtgaaagaggtgcttaccaatgggcataagggtcacatagtatgatgaagtgatgtgggaaaggacactccatctgcctgtgtgcctgagaagatggagacctaggctgaaatattctggcattcaataaggattaatttgtctatactagctactgggtatttgaattttataaaattatattttatagt

SEQ ID NO: 4005 - DNA, 571 bp, Homo sapiens
  misc_feature 24, 39, 62, 433, 457, 494: n = A,T,C or G
ctcctgagaaccatgtctatgccnattggccaataaaanattaaagctgctttaccccacangagacagagcagaaattccatccatgatctatctgctggtcctcacacttggatctcctaactcagatgacacctgacccagcctgggagtgacctctgcgttgcagctcatatgcacatcgaccatgtgcctgcctcactgctataagtaagatcagtccctagtaaggcctggcgaagctccccgtcagaaacaaaaagtcctccttttattttccaccccaagtcactgtctgggaacctctacagaactgaaggggtgtggcccttttgaaggacttccatgaacaaaaaggttcccagataagaacaatagacttattgatgaccaaatctgaacctgcttaccatgctctgtggtttctccctgnaaacgtttttcccataatccaagnggctgctttggaagagttgccagaacactttcatcanggctattttttcaccctatgattctggccatcatccagtttattttttgaaaaagagcagccaggagtaaatcacat

SEQ ID NO: 4006 - DNA, 180 bp, Homo sapiens
  misc_feature 21, 35, 103, 108, 111, 121, 124, 126, 130, 138, 151, 153,154, 159, 165: n = A,T,C or G
tgctcttagcaagaccacagnatatacctggaagntgccatccaagctgtccctccatgcctgccttttcaaacaggcatcttttacaacatgggatgttacntgcantgnatgacaacgntancnagangaccttgncctggctaacctntnnatttntttgtngaaccaagggttcac

SEQ ID NO: 4007 - DNA, 296 bp, Homo sapiens
ctcctggggactgatgcacacagctgtggaaatgatagtaaggctctttgttagagctcttgtggctgcctggagatgatgctgccttgccatggcctgctgttatcctcggggagctgggacgtgggcacaggggcatgcatttccccctcagcactagctccaagggacaatgtgcagcacttgctgagggcagaagaaaatggaaaacaaagacaaacaaaccaaagaaggcggatgaagtagaagccattcattctttccatgaacattgaccctatatcctgaaggtggat

SEQ ID NO: 4008 - DNA, 429 bp, Homo sapiens
  misc_feature 111, 117, 128, 137, 150, 156, 197, 258, 275, 277, 309, 316,322, 343, 381, 393, 411: n = A,T,C or G
gtgaggtcaagaattggctactgtcctcaatttgatgccttgctggaatatatgactgctcaggaaataatgattatgtatgccagaatatggggagtctctgagccccanattggnctgtatgtgancaaatgttngaattcactgganctggantctcatgctgccaggcttatcaacacctacagtgaaggaancaaacgtacctgagtactgctattgccctaatgggaaggtcttcactcatcttcctggatnagccatcaactggcatngncccagccccagacgcctgctctgtaacatggngacaaanacacgngaaagtggaaaagccatcgtnatgacctcccacagtatggaggaatgagcgccctctgnaccatgctaccntcatggtgcttgggaagncacttgtttgggcagcct

SEQ ID NO: 4009 - DNA, 303 bp, Homo sapiens
  misc_feature 18, 22, 25, 42, 55, 64, 65, 85, 95, 106, 110, 114, 120, 127,175, 178, 194, 207, 219, 242, 274, 278, 288: n = A,T,C or G
gacgtctgggggagctancacngcngtagaagctacactgcnttaagccaggatntgaattggnnacttgccacttcctccttgnaccaccttgncttttcttggnttgnccancaaccngggcctntgggaaccggcccaagccattggggatccttaaccgctggtttaatgnggnacatggaagtaaccantcaacccgggggnccttgggctttnacccaaacgggttgaacttttgnccttcaagcctggtaataaagcaacctaaatngggnccttgaagtnccccaaaaaaagaaa

SEQ ID NO: 4010 - DNA, 462 bp, Homo sapiens
  misc_feature 329, 410, 446: n = A,T,C or G
tgcctgtgaggattccttactccaagtttatgacaaacatattcagaaggcatagtctacaattagtgtttggaataaacagaaattatgaacgcacagagttggttgtgatgggcacgtctacctgtggctgccatttaagtggaaggtggaatccgactctggagcatcggcagcctgagctgctgctgggctcacactgaccctgggagtgctctatgcatgcttcaccttatgaggggtgcagagggaacaaaagtagaaaagtgtgctctactttcacgtgttaccaaaggacagaggacaccaccaaggatttagaaaactgntaagtgaggatttattcttcttaatagcctttcaagcaaggaatttgaaaacaagattctactcatcccacaccaaaatgnaaacagatatattattttctatactcccaggataanttgggtttacttaagc

SEQ ID NO: 4011 - DNA, 195 bp, Homo sapiens
  misc_feature 28, 31, 56, 59, 72, 81, 90, 145, 153, 155: n = A,T,C or G
gccggaggtgcttaaagacaacccctgnggnttagacacttatggcgcctttcacncgntgagggaacccgnattccaaanacctccagngcgatatgtgcaaccaaagctcccatccactactccaggcaccacttatgataanccccaaancnaaagtcctattgcttttttggttcttaccggagaactttt

SEQ ID NO: 4012 - DNA, 456 bp, Homo sapiens
  misc_feature 34, 38, 57, 77, 101, 214, 221, 271, 275, 308, 361, 371, 377,405, 421: n = A,T,C or G
gggaaacctgctgggaaagctggttcttgaaccnagangaaagggatggaaaattanctggccaaagaaggttggcnttaagcaacctggcttttcctttnctggacctccttggggaaaagttaaggaaagttggacttttgccagttggaaagtaactttttcttggaagggccagaaagaaagctgggccaagcccatttttatactggancctaacntttctttctctttggaaagggggaacctcccctcaatttttccaagaagnaagnccaaagggaatttctggggccctctaacccatnggcttttgggttacccaacctcatccccttggggggcccttgggtttcttttntggggaaaangggaanaattcattttccagcacttcaccaaccnttctaagctgggaagnaaaggctcccaacttttgcaaaatgctgggttaag

SEQ ID NO: 4013 - DNA, 441 bp, Homo sapiens
  misc_feature 105, 371, 379, 398, 410: n = A,T,C or G
tgaactaaaatgcatctattcaggcctctcttttccatgacgtatccttgcatctgaacaagcacgtgtggtgcctgctggaaatccagccactccaaggaaganagcaggctgtgttctcacgtggtatgcagacacacacaagtgtgctggaaaaggaaacgtgagactatgaaaaccagaccggccctggagagcagctgtgagagacaaggagacaggcctaaggcaagccactccccgccagcctgcgtcagcaggccgcaagcacccttgcttggtcctgcaggaaactcaagggggcatcgcaactaactatggctaagtgcaaccctcaagctggccagcaacgcgactggcaagcccggcangccaaacnaaacctcggctggcaacancatgcagatggnatggataacccgaaaggcaaactattgaaag

SEQ ID NO: 4014 - DNA, 149 bp, Homo sapiens
  misc_feature 43: n = A,T,C or G
tggggggcaagataacccaggacacagacaaaagatttctgtnttgtaagataagcttcatccaaggatcaccaaactcttgacatacagacagacagagatgtctcccaacttgtggaaataaaagtgacttcatcttgaaaaaaaaa

SEQ ID NO: 4015 - DNA, 185 bp, Homo sapiens
atcctgaaggagcttttaagcatgcagccactctaagctccctgccatccaactgggaagataccgagccagacagtcaatggccctaaagaggggagtcttgctcagcctggtgcacatcagttggagtgatagtgtgtcctataaacaataaggggcattactcctgaggggaaaataagaaa

SEQ ID NO: 4016 - DNA, 436 bp, Homo sapiens
  misc_feature 407, 421: n = A,T,C or G
gaataaagaacatcatcaactttctaagtgacctggcttggaagagtggatgaaggctattgaaaagaaacaaaggaaggtacctgggagaagaaaagttgacagcagaagagccgtggaggtgccagcatgctgtcctcagcgtaactctgcagtagaaagggaatgcaggctggacctgggaagctatactgactctgctcatctgcttcaattaacgttcttgacaaagcagcatttcggagcaagtgcttactatttatggctttaagagaaagtattttataaattatatgctccttgttagtttatcaaaataaatattaaaaagataggctttctcgctgacaatattttatgtctatgtccatcaattgaaagaaaatattataatctttccatatagnatggtttacctagnttttctcccccctca

SEQ ID NO: 4017 - DNA, 381 bp, Homo sapiens
  misc_feature 329, 331: n = A,T,C or G
gtgaggatcaatatggatctatgaacttaaaaaaaaaagggagagagatgtggagttaaaacaacaacaaaaacatcactcttcagtggctgccacaactcctgcttctgctttcccattcgctgccaaggacaggcaacctcagcgattgtaccgagtgagacgctgggcaggcgtgaaaggtacagtgggaacgctgggaccgatggtgtggggaaggacaggaatgaaccgtgcctccagtgaagagagcaccgtcgcacgcctgcccctttgcagtgtgacgttgctgttatgacattgctgttcctacaaccagcaggtgaggngngttcttcagctccttgaaaccaggcagaccttttgatatgctgagaccag

SEQ ID NO: 4018 - DNA, 109 bp, Homo sapiens
  misc_feature 43, 48, 74, 75, 87, 88: n = A,T,C or G
cctggccattccacaaagttaaatataatcaaattgagctttntgatncgccacatacacacacagaacgtacnnagtaaagggcanntagtggtttcgacctataaca

SEQ ID NO: 4019 - DNA, 161 bp, Homo sapiens
  misc_feature 31, 73, 97, 119: n = A,T,C or G
agagatgaccatggaatataagcaggagttngaagaaactacatgaagaattatgcatactgaagagaaactnttgaaaaagcttcagaaaaagcanatgaagggatttcagaaggaantacccaaaaatcacaggggaagatcggtctgaaattgagagg

SEQ ID NO: 4020 - DNA, 240 bp, Homo sapiens
  misc_feature 27, 39, 56, 58, 79, 88, 96, 110, 112, 115, 127, 129, 130,144, 162, 163, 189, 196, 204, 219: n = A,T,C or G
atggttctttaatgctgatgacaaccntccgccatttanatatgctaatcacttcntntggacattaactcgccccgcngtgactttntaattaancaaatcctggctananttnccgtcttacacntnntattggtaaaatcntttttcaggataaaaganncgattaaattcccttttatattttanttaaccngaggcatngccccaataaaaagnattttcccccccgggggggat

SEQ ID NO: 4021 - DNA, 580 bp, Homo sapiens
  misc_feature 436, 472, 531, 553, 555, 558: n = A,T,C or G
agtctcctgtgccctgcagaagagaagcctgcagctacactgaccagcattccttctgctgcagggttccaggttaaagactgccaagaggcactgtagggaggtttggaaggtggaagataaggagaactgttactctccagtagattcgatggcagaaacaaaggtggaaggtgcattcttgagcatcatctactcagtgctgcctgcagctgtgcttgggagacagctcctgctgagatgtctgaaagctttggtggcattgagtatcctgtaaattatctgcttgagcagttggattccacccttcaccctccagccttccaggaggctatggaagcctccaatgatttcctgcattaaaccgagaatacctagattgacttctgttttcctgaagcagtcacccttcacatgaccccaaactgatcgttgnaaactcaactctcttcatactggcatttctctcatncccagtatcatagcttccagtccaatcaatcatgggctttcccttggaagttttccctnccttggaggggtagggaccaantnaanggcctgggcattcaagggaaaa

SEQ ID NO: 4022 - DNA, 117 bp, Homo sapiens
  misc_feature 20, 28, 44, 77, 78, 82, 85, 100, 101: n = A,T,C or G
acatatatatttgttttctntttgcgtnaacactacttctttanttgaccactttgtcgtctgattggtgttttatnnaacnaanccacctgtgctttcnnttattataaccaacat

SEQ ID NO: 4023 - DNA, 151 bp, Homo sapiens
  misc_feature 16, 31, 38, 59, 65, 75, 85, 93: n = A,T,C or G
gggggaggctcccctncctttaaaggtcaanaaacttngaggggtcctcaaacttggcntctctntaccacatantatatatatntcccaggnggacttaccttattccaggaaatatggatggggccaattccccccctcctttcaaaaa

SEQ ID NO: 4024 - DNA, 115 bp, Homo sapiens
  misc_feature 28, 33, 41, 71, 98: n = A,T,C or G
atcctgtccgagtggaaaccaggctgtnaggtnacttactntgtcaactgcacccaggatgctttgcaganacaccctatcgatactgcgcctgatgnagcaaatgcctgacggc

SEQ ID NO: 4025 - DNA, 166 bp, Homo sapiens
  misc_feature 85: n = A,T,C or G
cctgtgtctggagtcatgccatcctcctctgttcacaggggattgcatcctttggaagaatgtgactaaaggggggggggcccanaccattccctcccccacatcctctcctaagactttgtggtgaaacaaagtaaatcttgcagaaattccatggaaaaaaaaa

SEQ ID NO: 4026 - DNA, 238 bp, Homo sapiens
gaagcactgggaagaggcatgaccgaagccaaggacctgtcgatttcaagtgctccgttcaagttggcttctgctgtttctcctctgtaccacaggagataccaggaaccaacccaccaaccaaacatcctccaaaacttaaatatgtatttaagacacattgtgtcccttaccttttataatgtatcattgctgttaatttctaactggactacaaccttatgtttgcaaaaaaaaa

SEQ ID NO: 4027 - DNA, 231 bp, Homo sapiens
  misc_feature 30, 32, 54, 65, 87, 89, 97, 98, 103, 104, 112, 125, 128,131, 135, 146, 166, 169, 185, 196, 199, 202, 211: n = A,T,C or G
gtgacagggaagcagccaggatgatgctcngnttctccttcctagtcagcaagnttcaacctggntaaatccaagctcctttgggcnantgttttgnnttttnncctggaanaaaaacttataanccnccncttnttaaatggccnccgccattttaaatggccgntcnggcccaattttttggntttttaacctnggnaanaattacttnttagcccccctttttttttt

SEQ ID NO: 4028 - DNA, 215 bp, Homo sapiens
  misc_feature 35, 36, 38, 46, 47, 49, 53, 62, 65, 73, 87, 89, 140, 150,200: n = A,T,C or G
aagaaaagccggtgcgggcgaagataccttggggnncncatgcttnngncaanggggggganganttgcttcnacccttggggaggntncggcttcaaggccctgggtttaaagtccaaagcttgaaattgggccaattnctttttggcnttttaacccttgggaaagaaaatacctcattaaggccaccttttgttatnttacccccaatcttt

SEQ ID NO: 4029 - DNA, 110 bp, Homo sapiens
  misc_feature 69, 87, 89, 95: n = A,T,C or G
agagctcacagcatcctgtctcctccagaagctcttccccagctgaaatggaagtgaaagactggtagnctcctcctcaaccacccntntgaggnggcccagactgggta

SEQ ID NO: 4030 - DNA, 175 bp, Homo sapiens
  misc_feature 16, 24, 35, 44, 46, 52, 72, 131, 150: n = A,T,C or G
acagctcagagccagncatgaggncacaaaagganaggggaacngnccgggntgaatgggtcggacttttcnttctagtcacaggccagacagggggatggcttggatcgagctgtaaaattgactcctgnggcggggaaaagaagatgnttcaatgatatggtaataagatgct

SEQ ID NO: 4031 - DNA, 328 bp, Homo sapiens
  misc_feature 29, 36, 55, 57, 66, 84, 91, 98, 99, 102, 108, 110, 124, 126,135, 139, 141, 148, 165, 167, 171, 182, 195, 205, 227, 233,244, 275, 291: n = A,T,C or G
agcacagttcccagcccctgtgtataaanttccaangcttgaatatttgggccanantcctttctnggcttttttccccccccngggagangaaaatnnctnctctangnccacaccctctcanantcttttaantccngnccctccntttgcccccatttatananatgngcggcggcccnatttttaaatatngggcccggcntatgggcccaaattcctttttngctgtntttaacccctnggggaaagaaaatactcataaagcccacctntgttatttacccccantcttcacaagaaaaaactgtaagtggctcccctttgt

SEQ ID NO: 4032 - DNA, 236 bp, Homo sapiens
atggaacgttagcagctggggacctttctgccaccacaaaagcctagattatcctgatggacgatggaagacacatggctgttgttccagctgacatcaagccaaccactggacaagataggaaagctctcctagaacacgaaggcccgaatgaactggcccagagcagagaaactgctcagccaaactgccaagctgtgattaacaaaggcttcatcttaatccaaaaaaaaaag

SEQ ID NO: 4033 - DNA, 131 bp, Homo sapiens
  misc_feature 24, 52, 59, 75: n = A,T,C or G
gagtttaaccccttttagagcacngttcaagccttggttaagtccaaagctngaaattnggccaaatttcttttngcatttttaacccctggcaaagaaaaatactcattaaaccccctttttttattttt

SEQ ID NO: 4034 - DNA, 390 bp, Homo sapiens
  misc_feature 139, 144, 158, 206, 216, 217, 219, 232, 235, 237, 241, 282,285, 287, 289, 293, 295, 298, 301, 302, 335, 348, 358, 363: n = A,T,C or G
cacagagtccaacagggaaggctggtggagagcaagcccctttgtcagcagtggaacaagagggaaggagccatcgaggagggactgatgagatctgactaactccagcactaacgaagcatgtggtcaaaacggcttnccctntgaggccttccttnatttcccccgcctggatggcacatcgtttatatgtgggtctacagctnggtgccacanntnaaaactgattttnttncntttnaaaacagcggaatatacacctgtcagctgaggaatgtttangangntncatntnccnggnntgggtcccagatgtccccggcttgggttaaagncctggctttgtgnattttgggcnccagntacttcatgctgcataataaacattcc

SEQ ID NO: 4035 - DNA, 180 bp, Homo sapiens
  misc_feature 20, 56, 75, 77, 78, 108, 122, 135, 141, 155, 163: n = A,T,C or G
gagacaccttaccaagaccncatttattttaacacttcctgcgagaccttaattgncaaacttcgaccagatttntnnaacaaaccttttgagcagagatcagcctgnataagtccaagctnaattggccaagancttttnctttgtaccctggnaagaaaanctcataagccacccctg

SEQ ID NO: 4036 - DNA, 119 bp, Homo sapiens
  misc_feature 20, 33, 34, 49, 56, 59, 62, 69, 77, 97: n = A,T,C or G
ccctttttggaagcaatggntcaagccttgggnnctaaagtccaaaagnctggaanttnggnccaaatntctttttnggttttttacccttggggangaaaaatactttcaattaaggc

SEQ ID NO: 4037 - DNA, 163 bp, Homo sapiens
  misc_feature 76, 77, 84, 93, 103, 118, 121, 128: n = A,T,C or G
gcaccaaggtcctgacaccattccttaatagatttggggtgagagagatccctcccttctctatgaagaagcttcnncccattnaaacgtttnacttcagtanctctggcttccaaanacncactctnccctgatattgcatgtagttgatgtccaaaatcct

SEQ ID NO: 4038 - DNA, 142 bp, Homo sapiens
  misc_feature 28, 46, 47, 64, 66, 70, 85, 124: n = A,T,C or G
tttcccttttgagcaagtttcagcctgnttaagactcaagctgaanngttgaaattcctacatncnaaantcccgccatttaaanggcccgttatggccaaaaatttttgctttttttaccctnggaagaaaatactcaata

SEQ ID NO: 4039 - DNA, 215 bp, Homo sapiens
  misc_feature 43, 49, 63, 78, 81, 95, 155, 188: n = A,T,C or G
cccttttgagcaaagttcaagcacttggttaagtccaaagctngaattngggcctccgcttgngccatttaaaatggngcngcggccattttaanatggggcccgcttatggggcccaattctttttggcttttttaccctggggaaaggaaaanattacgtccataaaagccaaccctcttggtttnttttaccccccaaatcttacacaaaag

SEQ ID NO: 4040 - DNA, 254 bp, Homo sapiens
gccaagaaagatatgttgctttgggaaactggaaatcaacagaccaaaacagccagaagaaatgggtggagagaagatagagcccgttcactctgcagtctccgcaggggtacagagtgatggcagccatgggtgcccttacatgcgacttgaaccagattctttcagacgccaaatgttctctttctgtgtgcatttgcaaggatggactccactgcgtaagtggactaattgaaccttatgagcaaaaaaaa

SEQ ID NO: 4041 - DNA, 461 bp, Homo sapiens
  misc_feature 52, 160, 255, 314, 319, 347, 349, 353, 355, 368, 382, 388: n = A,T,C or G
gttttcctcgagaagagagaagatgtttctgccatgttaaggggttcagaangtgagcacatttggcgaaataaatttaaagacttgacaataattccacagtagtaagaagatctaccctgaagaatgtcatacttttttttctcctgggggtaacagncctggcacaaggaagaagttgggttctgcctggatgatgaggaccttgggaaggggcaagagaccaggtcatacagaaagcagcaaaaacccagncggtgtggctgggtccatgtcgatagaccgcacggaagaaagaaagagcctgggaaaanggatnggttggggatggcaagggtgtgaattanangggnanggaccctttggcntaatttttcaatcnggaaangcttttttccttacggttttaaatttccaatttccttacaatttttgaattctcttaccatctcttgaactgg

SEQ ID NO: 4042 - DNA, 106 bp, Homo sapiens
  misc_feature 48, 49, 76: n = A,T,C or G
gacacctcaagggaccaaagagatctggacaggaatcgccggccaggnnggcaacttgccaaccaagaagcatttngaaccaaaccttgctggggttaataaaaat

SEQ ID NO: 4043 - DNA, 249 bp, Homo sapiens
  misc_feature 43, 45, 62, 63, 69, 72, 80, 116, 120, 134, 135, 137, 138,140, 143, 146, 154, 171, 177, 187, 190, 205: n = A,T,C or G
atgaagctcacagtggcctgcactttaccccagtagccctgangngggggcccaggcccccnntgaccnacnggggttancatgggtgttacctccttccggtttttaaccaatancccnttccctgggtgccnnanngntcntcncctgaggnaaagccccacacacacngtgtcnttttgccagnttntcaagacaaattaanattaccatctggggaaaggtggagggagaccataccaaccttag

SEQ ID NO: 4044 - DNA, 202 bp, Homo sapiens
  misc_feature 40, 43, 44, 46, 51, 59, 66, 75, 78, 79, 81, 86, 87, 157,160, 163, 165, 170, 186: n = A,T,C or G
aaaaggagaaatgcccttcctacactacccaaccaagatnccnncnccccnaggcaganatctcanttgactcangtnnanccttnntctacaagtcttcctggcaaccattagaagctaccttttgagcaaaaatctctccttcataaacccaaanatnaancnggacncgctttacatttaaantggcgcgccatttaaa

SEQ ID NO: 4045 - DNA, 193 bp, Homo sapiens
  misc_feature 85, 137, 171: n = A,T,C or G
tttgagcaagttcaagccttgggttaaagtcccaaagctggaaattgggcctccgcttggcccattttaaaatggggcgccgccnattttaaaaatggccgcttatggcccaaattctttttgctttttacccttgnggaaaggaaaatactcaataaaagccacctcttntttatttaccccccaattcttt

SEQ ID NO: 4046 - DNA, 576 bp, Homo sapiens
  misc_feature 347, 379, 436, 473, 486, 501, 540, 553: n = A,T,C or G
actaaagccttcagtttaagatggaacaagcagggatgaaagaagacagtttcgtaacactagtcttcagagagctaccaaactggtgttttaaatgtctaccaacggggagacgacctgacatcctgtttgacaaaggaaatcaatacagtgatgcggccctggcaagtcaaaaacactggagattggaattttcttcaaaatgcctagtccttggtgaataaatgctgtctctaaccatctgctgctgacacttgaagaaagaattacaaccaaactgaccttcatcccggagatttacaaccaaggggaacaagcttttcccttctgtttccaacacctatggnctgataacctagctactccaaatgtagctttncagcactgaactgggaaaataaatattaaaaggtagtatttaaaatatttagaatgnggtatttggcaccatttaccatatacccctggattcntggaaaaaagaanctaaaatctcaaagngggctgggcacagtggcttatgctgtattccacattttnggaaggcgggacnggcagatcacttgaaggcagaaa

SEQ ID NO: 4047 - DNA, 245 bp, Homo sapiens
acttggtagacatgaagatgcaccttccagatccctcttcaagggaagacttgctgtccagcagcaggaaagatggacagcagaccctccaggtcccttctcagctgcagagtctcctcacctcacccgaggacatgcctttcttgggacagcctgcagaagagatcaaacatgataaagaaataaacaccctctccttttcatagatatggtccccaataaacaccttgtaccccaaaaaaaaa

SEQ ID NO: 4048 - DNA, 158 bp, Homo sapiens
  misc_feature 75: n = A,T,C or G
gatttggaaactgctcaggaaaacaactggattcctaataatccctgaacaattcttttttttttcttttcctgnggacattagccttttaatttttccacaaggaattctgggccaatttaactaataaataataacagaattttctaagaaaaaaa

SEQ ID NO: 4049 - DNA, 569 bp, Homo sapiens
  misc_feature 456, 462, 518, 530, 549: n = A,T,C or G
tcgcgtggagctctgcagcgaaccctggccgcgcggcctccgccgtcgggccccactcttcctactgggcccacagttccggctcctgctctgactccaagaagccttacctcgggtacaacgcgctgccttctccctgggaacttccgccaggccaacttccctggcctttttagtctcccctgtgccctcccacttcgccctctggttctctccccgcccctggcccgaggtcacgccctcaccgagtcctaggacacgccccgtgggtccttgccaagccctacctcttcgtaggacacgcccttcaaacccttgccacgccccaccctggtccggggccgttccccgcgtttttgctggccacaccctcctgcaggcgctgtctgactgtcggtagtttggctgaatgaaaaaaattcggggctagatccccaaacggaaagaaactggtgnattttncccagatccaattcttcatagaacaagtctggaacaaagggagcattccgtaactntttttgggtttnccccaagaataaatcggangggggggctcttggcaattt

SEQ ID NO: 4050 - DNA, 172 bp, Homo sapiens
  misc_feature 16, 19, 35, 40, 44, 53, 71, 82, 94, 106, 107, 117, 127, 128,141: n = A,T,C or G
taacatgtgaccctgntgngataccactgtcagcngctancatnttaaataangcggttaactattgtccnttgagataacntgtgactatagntttttacagccnnatgaacgatntacatacacnnaattttgattacngagcgcatacggcagagaaggtatgcacatg

SEQ ID NO: 4051 - DNA, 418 bp, Homo sapiens
  misc_feature 51, 66, 118, 120: n = A,T,C or G
gaaatggtccttttccacctcaatttggaaatcggcccttcccatgggggnaattcccagcacttncccaacccaggggaatccccacccccccggcaagttttcccaaggaattttncntccaacctggtacctttcaggggaccccaatggattcctggtaccaatggaagccatttatgggcttcctggcttccaaactggtctttaagtaccccacttggtggtctaatggggttgggaaaaaggcattttggggccgccaaaggaaaaggggatcaatcccagggctttaaaaagggcttaaaaaggaaaaatggatggaaaaaatttgggggggcctacttaacccacttggtttttttggttgggcaaacattttcccgaagaaaaagctttcaagacaatggcctttatt

SEQ ID NO: 4052 - DNA, 218 bp, Homo sapiens
  misc_feature 17, 50, 64, 80, 124, 133, 135: n = A,T,C or G
ttacttacattgggccncaggcttttaaaacaatttcaaatgggaatgcnacgaaagtttgctnatgggagcatcactgnaataaaggggaggggctcaaaagactcctatgggatgggggagnaataagtgngnatggttaggcaccaggtttattttttaaaagaaaattcatcttgctttttggcggaaggaaatcttaagggataaaaaggggc

SEQ ID NO: 4053 - DNA, 414 bp, Homo sapiens
  misc_feature 23, 35, 45, 49, 54, 56, 68, 72, 95, 102, 113, 127, 140, 146,169, 174, 189, 196, 206, 209, 232, 236, 243, 256, 279, 290,291, 292, 308, 342, 345, 355, 369, 382, 384: n = A,T,C or G
tcttggggggtagactacctggnattaaaggtcantaactagtanccancaggnanatcctacaaggncaanaatggcccgccttagggaacacncctgacnttcaagggtantacaggccctgaancgttgggctgggnatttgncctttcctgaagctaacccggtncaatncctgacttagtgggnggtggtnaacaacttcnggnaggccggtgtaaactaaatcccntacncgttgcnactaaccatgganccaacttcctgaagcctagcaancccttgaatannncggagcttggcacccnttttggggacaaaaaggaaggactttgcccttgnaanccttcccctnttgatgaaccaggngggaatcctttcngnccgaataagcttcaatttaaattgaaagaa

SEQ ID NO: 4054 - DNA, 326 bp, Homo sapiens
  misc_feature 38, 59, 106, 200, 280, 304, 309: n = A,T,C or G
ctaccaaacctgggggcaaaaccggtttcccttttganggccttctttattttcccccnctgggatggacaacggttattattgtggggctaccagttcggtgccnaagcttcaaaactggattttgttcattcttaaaacaagcgggaatatacccctgtcaagctgaaggaatggtttaaggaatggttccattatanccgtgccttggtttccaagttggtccccgggcttggggttaaaagccctggctctgggggaatttgggctccaagttacnttcatggcctgcataaataaacanttccnaaaaccccaaaaaaaaa

SEQ ID NO: 4055 - DNA, 420 bp, Homo sapiens
  misc_feature 38, 43, 48, 58, 79, 97, 98, 104, 113, 123, 154, 159, 165,169, 175, 192, 207, 218, 230, 238, 240, 248, 259, 260, 263,271, 280, 283, 294, 301, 324, 331, 336, 340, 351, 358, 363,368, 373, 385: n = A,T,C or G
agggggggggaaaaatgaaaagggaaaccttttttgcnccaanggaancttggcccanccttttgggggggggggaagnaaaaggtgggattgaaannaagggnccttgtagnaaaacctggnttgggcctcctggtcttgaacaaaaaagctngaacnaaccangggnggggcntttccccagacagaggncgggtccttaccttnggagcttaaanaaacgcgccgantttggctnanacacactntttttcaaaannctnggtcccanaaaccgganccntttaggccccnaacatcnttgaacatttccttggccattgngaaaccnttttngggncccccaagganctgggtnggaangcccnttttnagggtttttggnaattccaaaaaaaaccttttttttttgggcccggg

SEQ ID NO: 4056 - DNA, 367 bp, Homo sapiens
  misc_feature 24, 77, 101, 117, 135: n = A,T,C or G
tgggaagaacacaagaaccgtggnaccttgggcgcagcgggtggttgcatcaagaaggcggtggtgcttgaagaaangggtggatggtttaagcttgtggnaaaaaatggacttcanggaagccaattaaaatcnaagtgcccaaagctttccccttgcgcaatctggaataagaccaccaaagttggaaagccccggtggttgccgccacaagttgccaagaaggcccgaagccttgtatttccaagggtaagacgttggggactttattggacttgtggaaattcaatttacatggtaaactttcttgacaatttcacttcttgtggccaaaataaaaggaaaccatggaagggaccaaaaaaaa

SEQ ID NO: 4057 - DNA, 450 bp, Homo sapiens
  misc_feature 20, 39, 47, 48, 74, 94, 225, 315, 361, 369, 373, 385, 429: n = A,T,C or G
ttaattttcggggaaaccantggtaagaatgcccttcgntttcttannaaaaagggccagaaaggtttgccaanaaaggaaaagggggaccaanggaagttttcaagaaaaaagtggggcaagttgggttgggcttggtggggggaatcaaaggtcccttttgggcttggcattaaaaaacccccaaggccccttgggattaccggggggaagccgaagcccaanggggcattcaaagggggaccaaaggggcttgggcttaaggggaatggggaagaaggtcttcttgacaatttcttacaaacaagccttaanggaacccacccaaaaagaacccttttcgaagaaaagccccttgctncccacaangatnttcttgggcttncccttctacccaaaggggactaaaagggtcccccttgggttccncaagaaaagaaaaccaagggg

SEQ ID NO: 4058 - DNA, 357 bp, Homo sapiens
  misc_feature 19, 54, 90, 92, 106, 108, 109, 115, 143, 149, 153, 155, 157,236, 237, 245, 270, 284, 286, 303, 305, 312, 318, 327, 331,340: n = A,T,C or G
gtctcagctgaggactgtntcatgcgcacctcttcgcaggagtacgaagccacncgtggccctactctgcgcccatcctagtagcctatnanagaccccagcctgngnncggcanagaggagaagcaccgtggatgtgcagantatggntggncntngtagagaagcgggttgacttcagagggacatgcctgatggagtaactttgcacaataatccaaccttgagatggcttgnnttcaaggngaagaattacctaccacccctcatnccttttttcaactntnctttgccacttaaagancnacttttnctcaanagtacaatncctnacatttacnatgcttcaaaaaaaaac

SEQ ID NO: 4059 - DNA, 178 bp, Homo sapiens
  misc_feature 21, 22, 61, 70, 89, 95, 114, 130, 155: n = A,T,C or G
gcccgcacgcctggggtcagnnggagatctatggtggactttatctgtgtgcccttttaangagggcctnttgcttaaaataacctaangagccnctaaattacacttacctgnaaatgctgcattaatnggattcttttacaaaaggctgaaanacctgggctttttggcccttcat

SEQ ID NO: 4060 - DNA, 328 bp, Homo sapiens
  misc_feature 48, 49, 65, 67, 76, 77, 116, 125, 131, 135, 139, 141, 184,186, 208, 225, 234, 238, 263, 264, 269, 278, 282, 284, 285,288, 302, 309, 311: n = A,T,C or G
tggaggatggatgaacatctcttgcatggattgggacctgaaactganncttgaaagataatgcngngcctggatnngtgccccaccgggccctcttgcccaaattcaaatccttnatggaccantgcaancaantttntnaaaagccccaaacatctcttgtctaaacagggaaagcttcttnancgtgttttttacctgtgtcttngaacaatttcattttcnccacctgtnagtnatttattgcgttgacttttggtcgnnatatnaaacccctnttgnannacnccccttaacttagnaacttantntaacatatcttctttga

SEQ ID NO: 4061 - DNA, 122 bp, Homo sapiens
  misc_feature 31, 49, 50, 52, 58, 60, 62, 96: n = A,T,C or G
ctcaagaacttcagctctgacccatgggtcnctagccacagctcctagnntnttaacntnanctttttgtgtcaaaatactgcaccctgctggaancactactgtaccactgtgcctaaagg

SEQ ID NO: 4062 - DNA, 375 bp, Homo sapiens
  misc_feature 18, 21, 38, 45, 66, 67, 126, 127, 136, 143, 147, 148, 157,160, 164, 167, 172, 181, 192, 214, 232, 238, 241, 267, 272,291, 298, 299, 315, 326, 338, 355: n = A,T,C or G
aaggaagaagtctggaancanctgtgactatctacctngctgaanccccggggggggtgggtgaannttttttgggtgggtggggcctggaaacctggaccctgggaaggaaaatggctggggccnngggttaagnggccccnccgnnccttttggnccnaaantcnaaatnccttttttnggcccaaaggngaacacactttttttaaaaagnccccaaacatttttttgngttaanaanggaaagggttttaaacttttttaccnggggnttggcaaatcattttcccnttttaanntttttgccccaccctnggggggatttnaaaccttgtggncccccttctttgaggtntttttaaaatttttttaaaa

SEQ ID NO: 4063 - DNA, 170 bp, Homo sapiens
  misc_feature 50, 53: n = A,T,C or G
tggaacttgacataagctaaaggaatcatcttacaccatgacaaaatggngtnaggctggatccccaaatctccaatgtaacaagcctggaacacttatgtgtagaatgctcagactattagttgagagaaaaataaaattccattttgttcaagccattgaaaaaaaaa

SEQ ID NO: 4064 - DNA, 139 bp, Homo sapiens
  misc_feature 23, 26, 27, 38, 44, 51, 79, 99, 104, 107, 123: n = A,T,C or G
gccaagacactgcaagggcgggncannggtttgcaagntccttnacctggngggatttttaagacttaattgtcttacnctttttcccaaacttaaaancctcnagnggttccttcccgggcnacccccaaaaaaaaaa

SEQ ID NO: 4065 - DNA, 704 bp, Homo sapiens
  misc_feature 20, 60, 90, 93, 123, 126, 135, 141, 143, 145, 150, 151, 154,165, 170, 172, 174, 184, 191, 200, 208, 209, 211, 213, 231,254, 289, 302, 304, 322, 350, 395, 400, 405, 437, 439, 443,498, 567, 591, 592, 619, 633, 635, 636, 651, 669: n = A,T,C or G
gggaacatctaaaggccttngatgatgaaatcaatgcttttttggacaatatgggttggnaccggggaggaattcttcgaagtcccttgntgngcacagtgtcaggcctggttaacgtccaanctnaattgggtnacatgncntngtgcnnttntaccctggggnagagnantnaggactacanaagaggncaccttatnaattattnncncncccatttcttttacaaanggaaaaaataccttgtaaccctntggtattaaatcttgggggaaattcaacaactttnctcttttcggcgntnaccattggcttgggccanggaagcttccaatttccttcttcccacnttttgggggaaaaggggaagggccttaccaaacctttaaccaggngggtncaaanggaatccttttaccccaaggcggccaaggggngnaaanggccttggacccattcccgggggagggggaaccccaaaactttggaaaattaaanaaccccaccaaggcaaccaatccccaaccggtaaagccaaggaattggccccttccttaccccaaaagntggggaagttgggaaggggaaaannaaggccttccttaattaccccgccctnaccaagaaaatttngnnccttccttggggggnattattaaggtttaccanttggaaaccaaaaaaaggcccaaacttttggccaa

SEQ ID NO: 4066 - DNA, 327 bp, Homo sapiens
  misc_feature 23, 25, 85, 91, 109, 118, 130, 131, 137, 159, 164, 185, 207,217, 219, 229, 252, 278, 280, 296, 299, 300, 301: n = A,T,C or G
caatttgaccttttgagcattgntnagcctggctaagtccaagctgaattgggccaattcttttagctttttacccttgggaaangaaaantactacattaaagcccancttttgttnatttttacccanngacccntttaacaaagggaataatactnggttngggaagggcttggggcaaaangctttttgggacttaactaacnattgcttccngnaaaatggggngggggaacaacttattgggaagnttaccaaggggaaaaggaaaaaccangnaggacccccccctggnaannnattcccggtaattgggccttggggaa

SEQ ID NO: 4067 - DNA, 169 bp, Homo sapiens
  misc_feature 19, 24, 27, 43, 44, 60, 73, 77, 84, 86, 99, 130, 137, 138: n = A,T,C or G
ttcatggtaggagtgcaanctttnttncccagttactttccanntcctgggctggcttangaccccgtagttnctcnagtaggncntgaacgttatgangcatcacaccctaccctgggaggaggaggangaagaannaaggggagggaggaggaagaggtcccaggaa

SEQ ID NO: 4068 - DNA, 249 bp, Homo sapiens
  misc_feature 16, 25, 36, 39, 40, 54, 64, 78, 94, 119, 123, 128, 153, 182,186, 203, 208, 224: n = A,T,C or G
gggtgggaaaccaagnaaaaaattncctttccttgnggnnccaaaaaaggaganttttggggcnaaccccctttgatntttttttccgagaggncggaaaccccccttctttggaattnggtnggttncctttttgggaaaaaatgggtcccnaaatgggaaggaaaaggtggggggaaaanccangctttccaaaattaccnacctngggggaaaattttttnaaactttttttgggaaaaaccaaaa

SEQ ID NO: 4069 - DNA, 128 bp, Homo sapiens
  misc_feature 21, 24, 34, 53, 61, 69, 92, 106: n = A,T,C or G
tacctagagcacaaccccttnttngaggcaaagntcccagactctgggtttanaaggtccnaaggcctngaaattggggcaaattctttttnggttttttaccctnggaagaaaaatactcataaagc

SEQ ID NO: 4070 - DNA, 105 bp, Homo sapiens
atgggagcatttgatttaccagttcggaggccatcatgaattaattgaatatgttatagctaaaggaaaactcatctataaaacatgatagatttgaaaaaaaaa

SEQ ID NO: 4071 - DNA, 335 bp, Homo sapiens
  misc_feature 36, 47, 57, 63, 82, 97, 111, 126, 129, 133, 134, 160, 192,195, 202, 239, 246, 258, 286, 302, 303, 308, 313: n = A,T,C or G
agggaaactcttgcatcaaaatccgcttttcccggnggaatttggtntcccttgccnaccggngggtgggaaagaaccaacntttttaaaaattaantttcctcaaccaanggaaatgggtttttnttntccnnccctggaagaaaaaaaaggggggggngaattggggggggggggctacccttaatagtnggngcctggnggatccatcattccttgaaacatagcttgctggggtntatttcnattcttgatggnggggggggggtcttccccagcctcctanaactaactttttgggnnataanaaatnttttttgccggaacctggggaa

SEQ ID NO: 4072 - DNA, 107 bp, Homo sapiens
  misc_feature 23, 31, 45, 65, 86, 89: n = A,T,C or G
ctttggggaccattcctcccttnggaccaantagaatactatatngtatcatgcgcaacacttgnaaaactttgtgtactccaatntanccttgaaaaaaataattt

SEQ ID NO: 4073 - DNA, 392 bp, Homo sapiens
  misc_feature 35, 43, 44, 45, 53, 60, 73, 80, 86, 108, 118, 119, 130, 136,137, 138, 149, 166, 181, 184, 201, 228, 229, 256, 262, 268,276, 312, 342, 365: n = A,T,C or G
ccgcggttacttggcaatcaacgatcatttcggancacgaaannntggctggnctaaaancctacaaggtttngcaaagngtcatnggagtttggggcttcggcctanactatttggnnttcggaggccnccaggnnntttttccaagnggtaccgccccaagaancaagaagttggaaanaanggccccaggcatgccgnttgtccacgggctcccagctaggcgtnnatgggatttcaagcttaccaagctttncaagcncttcantccccaantggacaccacaggtaagaaggcccggccttgtttgnacttaagaaagaaagaaccaaggtcttgtnccttgggaacccccgttccttgnttggggggggtccaatttaaccccctt

SEQ ID NO: 4074 - DNA, 711 bp, Homo sapiens
  misc_feature 17, 54, 62, 80, 85, 108, 119, 159, 167, 179, 238, 242, 260,309, 315, 353, 355, 359, 373, 377, 379, 384, 398, 426, 452,466, 472, 491, 495, 496, 499, 506, 515, 523, 527, 530, 540,553, 566, 569, 587, 594, 610, 635, 639, 645, 653, 685: n = A,T,C or G
gaaaaaaccaatgggcnttttttgggacccaatatgggtttggggccccggggngaaatttntcgaactcaagaaggggnggggngttcattgggtgggactcttaanccttttctaanctttttttctttaactgggcaatgggaatctgcctcttcnaaataatnggcttgggggtnaaccaaaggttttattggaaagaaataagaccctgcttcttttcttctttaaagggggnaatncctcaccctttgggaatnaatctttgggaaatcacccactttcttctttccgcgggaccatggcctnggcaanaagctcatttcttctttccacttttgggggaaaggagngngttncaaaccttacaagngggncnaaagnaatcttaacccaancgccaaagggggaaaagccttgacattnccggggaaggaccccaacctgggaanttaaacccacaagnacaatncaccgtaagcaagaattgncctnntanccaaggnggggagggnggaagggnaaanaancttcttttanccgggttacaagnaaatttgggcttnttnggggaatattaaggttanccttggnaacaaaaaagccaacntttgcaagaacccggggggttttantaangggaanaaagccanccctttttgggggccaataaaaaatgggattnttggaaatgggggggggaaaaaaaaa

SEQ ID NO: 4075 - DNA, 143 bp, Homo sapiens
  misc_feature 17, 40, 49, 60, 61, 64, 80, 94, 113, 116: n = A,T,C or G
gcccttttaaaggtgcnggaaaacttggaggggggtgcancccctgggnttcttgggggnnggnaaaatccccacacaantaaattcaaacctncagccccttttccacattntantggggcgttttttcattttttggcggt

SEQ ID NO: 4076 - DNA, 242 bp, Homo sapiens
  misc_feature 52, 71, 73, 74, 80, 84, 90, 92, 112, 115, 127, 142, 145,149, 169, 170, 177, 178, 184, 207, 219, 224: n = A,T,C or G
cctcgctggccgaagcgccatttaaataactgtcttaaaaaaattactcccngccctgccactaatcggtngnnctgaangtantcattnancattctgccgtcattggaanccntcacaaacaggnttgatagaacctgantcnccancggcattatcacccttgtcnncctttcnntataanactttgcccatggatgaaaaacngggggccgaaanaatcntgttcatatttggccccc

SEQ ID NO: 4077 - DNA, 154 bp, Homo sapiens
  misc_feature 25, 38, 45, 49, 51, 60, 61, 72, 78, 82, 134, 136: n = A,T,C or G
ttatcaaccatataagaattggtanctattgtgcgtgnaacaacnaaancntttactttnnacagacttcgncgctanatgnctttttaattcaaaaaaaacccccgtgggttaattatttaatcactggttgntnttacctgcccagccggcc

SEQ ID NO: 4078 - DNA, 464 bp, Homo sapiens
  misc_feature 18, 29, 34, 47, 48, 60, 65, 67, 110, 120, 139, 143, 148,168, 175, 255, 312, 393: n = A,T,C or G
gctgggcggcgcgccatntaaataactgncttanaaaaattactccnngccctgccactnatcgnanggactgacgtaattcattaagcattctgccgacatggaagccntcacaaacangcatgatgaacctgaatcnccancggcntcagcaccttgtcgccttgngtataanatttgcccatggtgaaaacgggggcgaagaagttgtccatattggccacgtttaaatcaaaactggtgaaactcacccanggattggctgagacgaaaaacatattctcaataaacccttttagggaaataggccangtttttcaccggtaacacgccacattcttgcgaatatattgtgtagaaactgccggaaatcttcggggggattcactcccncaagcgatgaaaaccgttttcaggtttggctcatggaaaaacgggggcaccaaggggtgaacacctattcc

SEQ ID NO: 4079 - DNA, 419 bp, Homo sapiens
  misc_feature 311, 342, 345, 363, 388: n = A,T,C or G
atcccctccaagcattttccaaagcccgaggggctgcttacaagactctgcccatcacccccaacctggctgatctgggaccacatcagcacctggcctgactcttctaccaggatgccctccaagaccaacactgatgccttagtcaccctcaccagggaggctgggggtgcccccacatggctgctgcacctgatgttggaaacggaggctccaaaaacgtgagaaaaccgaggcccggaaagtgtcaacccaaatcacgacactccttgccccaaacccagaagcctgaggaagtaaggaagtgcggngggatctgtctttccgtgtgtcttcaagatnctnggggctgcccctcctggnttccttttgaggaaggcctcaaaanacccgcctttggtcacaggacagaagctggg

SEQ ID NO: 4080 - DNA, 123 bp, Homo sapiens
  misc_feature 24, 50, 104: n = A,T,C or G
acttgacgacttgaggctgatggngttcatgcacctgaaaccactgtggntaatatgttgccactgtttagatattacctgtcagcgtatcaagataataagcnaaaaagccggcctaataaa

SEQ ID NO: 4081 - DNA, 123 bp, Homo sapiens
  misc_feature 23, 36, 51, 66, 67, 74, 83, 102, 106: n = A,T,C or G
ggacactcacatcatgcccatgnacagcaggagggnacctgaagaactganccctcggtccggttnnacggatntcgcattgntgaggcaacgctatttatnaacntataccattgtttctct

SEQ ID NO: 4082 - DNA, 232 bp, Homo sapiens
  misc_feature 33, 50, 75, 93, 112, 114, 128, 130, 134, 140, 145, 151, 160,171, 184, 195, 196, 208, 209: n = A,T,C or G
ccatctgtgagagacacgtggaccccgtgcctngaaacaggtcctgggantggtgtaggcaccatgatcccctcngaagattcaggggaaaanaaaagggccattcaattangnggggggttttccancnaaancagggnggggnggtatnttgtcactntttgatattantgtcaggcggggnaagattattannaaaaaggcgggnnaataatctccaaaattggagatt

SEQ ID NO: 4083 - DNA, 114 bp, Homo sapiens
  misc_feature 39, 50, 52, 65, 72, 90, 97, 99: n = A,T,C or G
tacttgacgacttgaggctagatgccgtttatgcctganaaaccacgtgngnttaaatatagccnacctgtnttcataatctacttgtcntgcggtngnaaagaaataaatacc

SEQ ID NO: 4084 - DNA, 165 bp, Homo sapiens
  misc_feature 18, 30, 49, 69, 74, 85, 89, 94, 99, 119, 124, 132, 144, 146: n = A,T,C or G
atggtggcttatgcaaanaaaaccacctgngtttaatatgtgacactgnttgatattactgtcagccgnacaanatatatagtanaaancgggnttaantaagttggttttttgaaacnaagtngggattanaaggtttttttncnggctgaaaaatggaacgaa

SEQ ID NO: 4085 - DNA, 411 bp, Homo sapiens
  misc_feature 18, 32, 35, 43, 60, 61, 73, 75, 87, 115, 120, 130, 138, 144,158, 162, 165, 168, 179, 191, 225, 237, 240, 244, 254, 265,304, 311, 313, 325, 328, 331, 332, 338, 354, 376, 385: n = A,T,C or G
ggcccccttaaaccgttnagacaggacagtgnttntgaactgntcaatccttttgctttnnaccctggaagangnaactcataagcngcctttgctatttacccccaatcttcanggganaaactggccnccctttgngggcgngtcacagccggggnaaanccnaanttaatgggccnatttttttggtntttacctgggagaaatactcataagccacctttntattttaccccnatntttnacagagaaanacgtgtgatgnaacggactatcccaaggtggaaaagacagagaaaatgtnaatacangnaacaacagtaantantcnngggacnaagatggaccacatgnctttcccaaggcttaaaagcanggggatttntcaaactttttttcattaatcaatgc

SEQ ID NO: 4086 - DNA, 467 bp, Homo sapiens
  misc_feature 353, 430, 433: n = A,T,C or G
gcctccttggagcggggaaggagagctcttcagttcctttggcaccttcacgcagcatgcaagacgggctgctttttcttctgtttatggatgaggcacagagggtagatgacttgccccaagtccttcagctcattcatgctggggaaaggagtaagcttcaggcgtcttcccctggagttcacgccacctctgacagcaagtgagccgtttgctactcaagtgctgtttcttgcttttttaagatgagggaattggggcttggagtgcaagcattgggaagaatttcccaggaagagagatgcacagatgtgaagaactcgaaagccagaaaaaacccggggggttgtgtngcaagtaaaaatgccaggaccggggaccgggtggacatgtggcaaattgcggagggcttgtgcaagtatttacaggnggncgtacctggaggaagactgaaaacagaaaacagt

SEQ ID NO: 4087 - DNA, 458 bp, Homo sapiens
  misc_feature 364, 378: n = A,T,C or G
gagctccctgaaaggctgaaatgtcaagcttgtcaagtgtttcctgtatgcctgagcgctctctccctggtgagacgcagggcctgctccgtcaggatggatggtttaatcccacctgccactggggggggaccccggttgcttcacaccaactcctgagctcctcaaatggggagtgtcacgagtgggcaggggcagcttccctgtctgagcacattggaaacaagtcccggtcatttgcatcaggactgcctcgaggcttttcaaattcagacaacatctggtctctgcagagaaaaataattcacactgtgacctcccagaaaggtcaccacttcgtcctgaaacacttccttggccgcanggggttatggccanatggacgcattacagattcttaaataaggtcacactggagcaggggaggccctcaatccactgttactggagtctcataa

SEQ ID NO: 4088 - DNA, 459 bp, Homo sapiens
  misc_feature 390, 402: n = A,T,C or G
acaaagtgatcaagttgctggtttctcctgcctttgaagccgaaagtcttactaccttcttgtactgctctctacattagcaatttcatcttgcactctgatattatgaatgtcatgcctttaaaatgcatgaaccaacccttatttgcactaaaaattccaagcctttgatcattcctcatccttttgctcaaaaataactgctccaggttttgacttgaataatggtcaactcaaaagcacacatctccatgtttgatcatgaatctgcaaaattaaaagtctttgttctcattggagcaatgctggtaacaggaaaaggagtgaatccaggaggcagatagaagttggaagtcacagaaatatgaagaggattcatcattcttgganacagcctaaagngcataagttgttggagtgcttggggccctctgagtgttgtgaagggatgacataggt

SEQ ID NO: 4089 - DNA, 444 bp, Homo sapiens
  misc_feature 381: n = A,T,C or G
aaacagcttgatggattgctgaggcagagtgcaccgagcaagggttcagtcctccatagagctcagagcaaaaggaatgacccagccgggatgaacttgaacctatggccacctagctctggtttctgcttggacattttatttcaatcttatggcctgccttgcgctccaagggttacttatttcctctgcacatattttattttgatgccaaaatttcagatctgttttcttaagagcagaaggtcttgacctcaaagcccgggccatcacacagctctctgtggagtggggtgagggaggccagctgccggtcaccttctgctccagcaccgtgggaggcctgagtggcaaaagctccaaccccgcttgttcccggcnggggtccgaacaagaaggcttccgccccatcccaccagccatccacgggagacgccctcccca

SEQ ID NO: 4090 - DNA, 469 bp, Homo sapiens
  misc_feature 416: n = A,T,C or G
cctgacagtatggaggaagagccctgtcctgcccatgcacagcctgaaggcacaccccatgtggatagaacaccacgttgcacatcctccctgcagagcgcctcaggcccacactgctccctacccatgctcagtcccactttgcccagccgcagtgttgggctcattttcctctgctgggtgagtctcgatgagccctgcctccacttgggcaattgtttatagaaggtcagcagatctcctcttcacgaaaaatgggtccacagactttctactagtgcaggtgaccgaggccccccagccaaggacgggtttttcaagcattggtgacagacctgtgtgaccccaagctttatggggcagtgctgcattttttcaagcttaagaaaggtttccaggagcccctgatgactaanacttcaaatgttcctgagggacaggatatcgtgattgagaaaccaaccgggtc

SEQ ID NO: 4091 - DNA, 446 bp, Homo sapiens
  misc_feature 354, 364, 398, 400, 414: n = A,T,C or G
gtaaagtgaaggtacaggacatcctggaagctgagcagaggggcatggagccgttccatcccagacgaagcggcatcccatgcctatgggctgagaagcaaatgctcccagccaaatgttccatcacaatcaacaaatacaagaggatccactgccagaagctggagttgaatttatctttcccttattctttacctcagatctgcaacctcctgtctggcccccacagggtccagccctccttctgtgatttcttcaaactgacaccctggaggctgttgatgagaggacaccctctggtgaggagacactgggttcacagtccaaaggcggagtaccagtcatactcaaggngaagaaaaantgccacagtaggcctgagactattatttttaaangnctacttgcaaggtnggcctttggctgaagcttgggagcttgtattt

SEQ ID NO: 4092 - DNA, 460 bp, Homo sapiens
  misc_feature 320, 395, 434: n = A,T,C or G
atgcggaaacaaggctcagagagaaggacttcactcaaagccacacagataaggaagtgtgaagagggactggaacccgggaagtctaactcttgcctgctctggtgccggaaaaggatgtgcagggagtggactctcctccccacccccacatcccaggcagaaggaaggaatttgagccaaactctaggctgtgtgcctggctgtcccagcatatgtctgcacacagacctacaaattaggctttgttcggggctagaataggagccttggggaagggcctctccaatcaagttcccttggaggggggcggggtgganccccttctgcctggcactgccggatgccaccagccacaccccacttgacttctgaaaaacctgaacactgggagncattccatttggacaggacatcgccccttttggcaaganggagactgagtcagggaccccccccc

SEQ ID NO: 4093 - DNA, 328 bp, Homo sapiens
gacttctatttggaactgagtccgacagctcaggactggctgctcaaactccacaatttaatgaaaaatctcagatgatgactcagaaaacctctaatgatctgaggaatatattaagggattccagagtcaaaggctgatcatggagggcattgatgagggaagacttcaggatgctgcctcctgagaagctgttgtgtagcgagccttgaccatctcaaggaaagagacttactgtcttacacagcttccccttctatcttaagatgttgtcattgttgttagaaaactttgtaaataattaaatgaacataactgataaaaaaaa

SEQ ID NO: 4094 - DNA, 451 bp, Homo sapiens
  misc_feature 75, 122, 378, 396: n = A,T,C or G
caggctcgtctgagtatattcctaggtgatggcagaggggcaagaaagcaagcaaaaagaagcacagaagccctntcatggccaaaactggcttggtgtcacttttacctcattctattggncaaaaaaagtcaacaggctgagcccagagtcagagtgggagagtactgcatggttacatgacagaggatgtggatatgaggaatcgtgaagaactgcatccattagagccatctgtcacagaagggactactgtcattttactaattttgtacatgaggatagggaagcatggagatggtaacatgcctaaagtcacatagcttcttagctgtggaaccagaaagtaaacctgggccttctggccccagggcccgnggctggtaaaaccactgngcacactggcttattctacctttacaatcaaggtttctggttttgaccacctgcc

SEQ ID NO: 4095 - DNA, 430 bp, Homo sapiens
  misc_feature 30, 32, 42, 73, 77, 89, 119, 120, 122, 123, 127: n = A,T,C or G
cagagcttccctatctcaatatcatcggcngnatcatcggcncctttgctcacctttactgagtacttaccangcangctaaatatctncaattacttttgacacctctcatgatgcannanngaanagtggctctggaatcaggacaaccaggatccaatgatattacatcacctgtgcacaagtgacttaaccttctgaatgttgatattctatctgtgtgacatgggacacttatgataccatcccactgagttgttataaacagcttaaacaatataacaaatggagcatcataatctgccctgccagcccaaatcctgcctcttgagaagaagtaagggaaccagagcatgtgaacagggacagggtcacaccactttcaggaacccatgcaagctgtgctgagaaatcacactcaggactgata

SEQ ID NO: 4096 - DNA, 476 bp, Homo sapiens
  misc_feature 296, 308, 409: n = A,T,C or G
gtgtatcatttctactagcaaagaaagaagccgtgagacttcctgtcctcctctcgtaggtgtatcatttctactagcaaagaaagaagccatgagacttcctgtcctcctctcgtaggtgtatcatttctactagcaaagaaatgcagtcaggtgtgcacacactgaaagggcttctgaagtgttcaccccaagacgaactccaggcctgaatccatcaagggcgacagtgggcatgcccaggtccctcagggcccattcacacctgtgcctgcttctggtttggcacaggactncccagtaccatncagcaacccccagtcctgcgtgggactctcacgtgctgcatgtgcactgttaaagcagacaccacgacaccccgccctggcgggccacctggatccactgntcacgggtgatcttccacacccgttgggcccccaaccgaagggggatggtttcggtccgaatgaatc

SEQ ID NO: 4097 - DNA, 464 bp, Homo sapiens
  misc_feature 18, 19, 23, 366, 392, 399, 435: n = A,T,C or G
taactgaggctgacagannagangcgaagaagactgaagagtgtgatggcagcagtgtgtcccccagcctctcccggaaaggccctgatgcccatcagccagtcctcggggcctgttcaaaccactctggaagcccagccccttcaagcctgggagacttaacagagtgtatattccagctccaaatggctgagcacccctgctctacctagaagcctcaggaaacctttccaaatatcccttatcaaggtctgctcttcagatggtgacaatgtccccagtcagccgcatgcaactggaagttcaaggacctgcagctcactctggaggagaaaacaccttcacttgggaatgggctgacccttntgcagccggcattctaaacttgggtnaagcagnctggagccaagagtcactcacacttgggccactggnggaacagcatgaaaacagaaggtacctca

SEQ ID NO: 4098 - DNA, 473 bp, Homo sapiens
  misc_feature 361, 391, 429, 444: n = A,T,C or G
gcaacacgggcggcgctggcctcggaggagccccgggtggaccggctgcaagcccagctgaaggagctcatcgtcttccctcacaacctgaagccactctctgatagtgtcatcgctaccatccaggagtatcagagcctgaaggtgaagagcgcgaggctgcgcaatgccgcggcggtggagctgtggcagcatttccagcggcctctgcaggatctgcagctgtggaaggccctggcccagcggctcttggaggtcactgccagcctgccggacctgccttcccttcacaccttcctgccccagatcgaggcagccctgatggaaagctcccgcctgaaagagctgctgaccatgcttnaacttaaaaaaaaacctctggattggattntttggccaggagagagccacggcactcctggagcaggnggcaggttccatganggacagagaaccttgcttgcataacaacc

SEQ ID NO: 4099 - DNA, 473 bp, Homo sapiens
  misc_feature 364, 375, 381, 389, 392, 397, 457: n = A,T,C or G
atacctccaggtgctccactgctgctccctgaatcgggacctggaacttctgccctttggagacatgacagagattggagggcggggcctcaacctctctggggggcagaaacagaggatcagcctggcccgcgccgtctattccgaccgtcagatctacctgctggacgaccccctgtctgctgtggacgcccacgtggggaagcacatttttgaggagtgcattaagaagacactcagggggaagacggtcgtcctggtgacccaccagctgcagtacttagaattttgtggccagatcattttgttggaaaatgggaaaatctgtgaaaatggaactcacagtgagttaatgcagaaaaangggaaatatgncccacnttttccanaanatgcncaagggaagccccttcggttttccgctgccccatgagtttctttgacaccatcccaatangccggcttttgaactc

SEQ ID NO: 4100 - DNA, 437 bp, Homo sapiens
  misc_feature 20, 28, 403, 406, 422: n = A,T,C or G
ggagaaggcacctgtgctgnaaaagganccccaagagacccgcctggaccgtgtgggtgagaccatcgcaccctcctgccgagggagaaggcacctgtgctggctaaaaggggtcccaagagacctgcctggacagtgtgggcaaggtggatcccacagggaaggtcaccacaactactcacaataactgaggaggccagacacattgtgaaaaccttactgcgaaggcatcagagagctgcagaggctgcgaggacttaacgaactaaaattccagagaatggagaactgtcagataagcaggtgacccacagccatctttttacctggggacatttgcctatttgggacactgggctaaagattgggcttgggccaagccgaaaacttccagccggggaanaanaaaccagcaaagattntcactgtcacaggga

SEQ ID NO: 4101 - DNA, 440 bp, Homo sapiens
  misc_feature 330, 331, 337, 345, 360, 402, 415, 418: n = A,T,C or G
ggtcattgtgcatttttgttgactattgattctccccttcattcaacaactgtactgaggccagatcccaaactgagctctgacgagatggagaagcaaaggacacggttcctgcccccaaggagctcccagacaagcaggagagaaggtggctcccagacaagcaggagagaaggcagctcccagacaagcaggagagaaggcagctcccagccaagcaggagagaaggccgtggaaatgatccttctgataccacagcctgccgatgtcatctagaactctgggggattgggggaaaacgaacagaaccagattaaaaaaaaaccctnnccttanctaggggngggggggggcacctnttattccaacttctttggccggttgagggcaaggaaaatccnttgaaccccgganggnggaaacttgcattgaaccaaaa

SEQ ID NO: 4102 - DNA, 455 bp, Homo sapiens
  misc_feature 371, 373: n = A,T,C or G
ggccgctgccgcgaagcctgggaacacaagcacctccattcttgggtcttggtgcctgcagatcctggacactttgctatgatggatgagctgggggtcaggacgctggctaccctgaatgggtgaagaaaccagcccacccagccaagggccaccatgcagaagaaactgttctgagcacactcctgcatccgggaactcaaggtctacatgggatgggaaataccaagagccctggggtagactcccagagtgactggtccagagcccacaggcacagcacccatgggaacctcgcccctgccctgccctcagggccctgccagctcagagggactaaggagccgcagcatcctgatttcttttaccgnanttttaaagccaccttcgaatccacctgcacatatccctcccaaaagccacctcccctgtgcggcacagatgcacggaaggtc

SEQ ID NO: 4103 - DNA, 417 bp, Homo sapiens
  misc_feature 382: n = A,T,C or G
aagtacatactgaaggactaatacagacccacagaccccggctgctctcatttgctcccacaccctcacctcctcacctgctgaggttgcctgccttcctacacccaccatggacacagcttccacccttctttgccaatgaaggagctccagcaagtggggctgggaagagtcttcttatcatacagatgagaatacagaaagtgagaaagattgtcatccggccaaccagtaacagatacagaactcctttggcattcatctaagccggctgtgcatgttatagggattcaatattgggtgatgctttatgaaggaagaatgctttagggaacatcctttgtctaatgctgcttcctatcccctctttctgaactttacnatatttatttaaagcagcaaatgaaagaattcaag

SEQ ID NO: 4104 - DNA, 396 bp, Homo sapiens
  misc_feature 273, 290, 302: n = A,T,C or G
gttagccaccaactctacctccgccctatgccctggggagtggagcctccattgtcggtggaatctcccccagagccttctgctctagttcttagggccacacataattcattcatccatcatcagacatgaggataccgaagtaggggaaagaagaattccttctctagaagaacttactgacaaggaaattgatgtgttccatgctgcagaggcaggagcagggtggaggtgcgtgacctcactggaatgaagaaggcgaacccaatcgangtcttccaaggatgaancccaacttgcanggggctggtcttattcatgaccctcttgaatctgggctggactcaatgacctgctcagccacagaattggtagaagtaacattctgggacttga

SEQ ID NO: 4105 - DNA, 423 bp, Homo sapiens
  misc_feature 327, 360, 384: n = A,T,C or G
ggaacctaagacctgtggacacttccggcaccctggcctagtggaaatggttctctgggtctgctgggccccaagcacctgaggtcacgcagacgcccgcctgcctcgccttccattctctgatctgtcagccaccgtcagctgtggattccttcctgggaactgccatcactcgaaatgaagtcggaagcacagggccccaccagcctttctcctgtcacttgactctaacctggagtccaagtcaccagggccccaggacccaaaggtacacaaagcccacctggaccctcagccagtacttgccccaagccaaccttaaggatncaaaagtccacagcaccactgctgttggctaanctctgcctcccctgggcccacggnggtccgtgggagccccccacgagcttttgctgtcctttg

SEQ ID NO: 4106 - DNA, 432 bp, Homo sapiens
  misc_feature 40, 372: n = A,T,C or G
cctctcagacttcagtcaagtgttaagcaccgaagtgacnggtgtgatgtttgcatgcggcatatgaatattattgctcctgatgtgaagtcaggctaagagcctatccatcagtccaggaatgactaattattggagaacagaagattctctgtagtttctcctttgtatcaatacatgaaaaaaaaacctagaattttgtggtcaaatgtggctgtaagtgaacagataagagccgaagcaaatggaagcatgcctccattcctaagggaagttggtgagctgcccacagaatttgctgataaagacccatctggtaaaaccaaagccgaggagcgttggcaatacatttcaaccagagagaccataagnggttattttttcttgacagccttgttgggctttttttcttttaaagcccagaaaactatt

SEQ ID NO: 4107 - DNA, 415 bp, Homo sapiens
  misc_feature 334: n = A,T,C or G
ataagggaaactgaggtacagaggaggggaagagccatgattgacttcatgcaactcatcagggagggcacccagatttacacgtggatctgtgtcactacaaagcagtgcccttgacttaacactccatcactttccatacaagcttcaaactgaactccaccttcattagcttggtgagcgcagaccgctgaactcttctaacatctgtcttagaggttatgtgttggctgctgcattcagagctatcctaaaagtaactgaaacaagggatttttgactccatggctaaacagttcctggggagcaaacccttgatctaccattacttaanaaaacaaatcaaattagaagtcagactagtgatgttgcagaacttttcaaacataaagacccatgaatggacatgtcactt

SEQ ID NO: 4108 - DNA, 427 bp, Homo sapiens
atgtgggagaaggccatcaagctgagcaaagagttggctgagacttacgaaagcaaagtatttgactacgagggccttggcaacctcctgaaaaaaagggcctcattttatgagaacatcattaaggcaatgaggcctcagcctgaatactttgctgttggatactatggacagggctttccttctttcctacggaataaaatcttcatctatcggggaaaggagtatgagaggcgagaggacttcagcctgaggttgttaacccagttccccaatgcggagaagatgaccagtaccacgcctcctggggaagacatcaaagtcgtcccccaagcagtacatgcagtgcttcactgtaaagccagtgatgagcttgccgcccagctacaaggataaacctgttccagagcagatcttaaactactac

SEQ ID NO: 4109 - DNA, 431 bp, Homo sapiens
  misc_feature 363, 383, 386, 391, 395, 405: n = A,T,C or G
tgacatcagcaagatggttgactggagttgtctggctcttgctcccctctactcaacaaaagggaccaaaacaacaataaacaaactatatttcaactggagtggctgtggaagtatgctggagagcaccaggggagtgctgaaattcctgtggagcaccagatgccccagatagcaccacagagacgggagcgaagcactctgcctctgccgcactgcctccctgcaaggagtggcctggagtcaggaaggactacttctaatggggaaagggtaagctggggacccatggtccccatgaccactgcaacctcgtcccgcggtcctcacaaaccctgaatccaatttgtaagttgcctgcanttcacaagactaccttgttncanaagtngaanccattgtcantacagccttaattcccagcattaaaa

SEQ ID NO: 4110 - DNA, 257 bp, Homo sapiens
  misc_feature 28: n = A,T,C or G
gcaaccttacgagagaaacacaataacngtatgcatcttgaacagagtatttatcaccagaaaaacagttggagaggattttcagtggcttctttcaacaatgtttactcagcactaaccctgtactgggcaccgaggatacagctgataagaaatattagtccctcatcttatgcagcttatcgtcacttggggttttcaaactatagagtctcacccatagatgggttaataaaatcagtttagtgaaaaaaaaa

SEQ ID NO: 4111 - DNA, 423 bp, Homo sapiens
  misc_feature 317, 322: n = A,T,C or G
gctgccccatccctgttcacttgatgagttccaatttacattgttgtgaagtaccacaatgccctcaggaccaagcggaatgaatccctctttgcctgtgcgctccataggacatttacttgattgcattgccagtgccatactgctgtaatacgatttttggcttgccggatccatgagcaagactttccctaggttcttccaacaagcttattggaaggattttaatcagctaatgaactcgtcaatggtattttcaggagccaaggcaccttcctgcacctatatcccatgaccatatttgcctgacatcttgnggccncaagggagcatggacagtctataaacccaacatctgtacacagggcaagcagcgtctttgaatgctaatccctgcatcacagtcaagagcgagtataactc

SEQ ID NO: 4112 - DNA, 561 bp, Homo sapiens
  misc_feature 517: n = A,T,C or G
gtctcagaggtacaaatggcctacaggactgttcagaaggcaagtgcagcacctgaccaatggcattacagatcattcagtatgcaggatcacaactttgatgccatcttcaatgtctctctctccactttgtgtgcaatcttcagagcttattactcataccttatgttcctcaaagtgcttcccttccatctgggcaagtgggactcctgctctgggtcccatacagcagagcctcgtgcttaacagtggcctcctcaactttctgtaagtctccctttggttcctggagctgtctgcaactattagtgctattccaggaggtgacccaagccctgtagagggcccctatggtaccagctccctatttctccccacagtgcattatctgaccctcatttgccaggaatcaacacaatgccctaaggaacttcaggacttctgaatttggagcaccttaaggaagatatcactcctgccaggtaagcatgatattctttcatgaaatcatacaagnttggctaccagaatgatgctgatgaactgaatttgaggtattaa

SEQ ID NO: 4113 - DNA, 500 bp, Homo sapiens
  misc_feature 49, 57, 87, 89, 91, 96, 98, 101, 103, 104, 109, 118, 122,132, 136, 170, 177, 208, 233, 243, 248, 260, 285, 306, 317,331, 334, 337, 352, 363, 374, 377, 379, 395, 400, 405, 406,411, 413, 414, 437, 438, 453, 469, 479, 481: n = A,T,C or G
tgttgcctgccactcgttgcctaccactgcctgccaccactgccaccgntgcctatnaccgttgcctgccaccactgctgccaccgntncntgccncngtngnntgtcnctgttgccntttnatgctgtatnactngtcttaccactgctggcaccaatgccaccgttgnctatcancggttgcctgccaccactgctacggataagnctactaccggtgctgccaccgttgnctggcaccgntgctnccacagttgctnctttgaaaggaaatgagatcaacanaggcagacatgcagcccaggnggagtgccctnatgagtggctgttntgncanaattatcaagacaancattggcaccngctggaggggntancncccataacaccttgtnccaantgaannttganannaagccctggaggccctttaaagnngatctatcaccgttnaactttttaaaaaggnggggggcttnangacaggtggattacaagcc

SEQ ID NO: 4114 - DNA, 306 bp, Homo sapiens
  misc_feature 23, 40, 96, 101, 105, 123, 129, 130, 143, 150, 151, 156,168, 170: n = A,T,C or G
atagcaagtcaaatgccatgacntaatgaaaaaggaggancaccgaggagggacaggagcaggagagaacctggtgtctcctgacaattgccagcnccaanttgnctgaacatgaatgaaccnttggannctaatcgtgaccnagctcgnncttgntgctcaagctgnantgcaatggtttacaatctcatgagagatccaagtgagaaacacccaactaagccactcccaaatttgttttaataacttatcccaaaacttagtgtttcaagaaacaatatattcttaataaaaagtttgtccagt

SEQ ID NO: 4115 - DNA, 266 bp, Homo sapiens
  misc_feature 23, 48, 50, 68, 82, 103, 111, 114, 117, 120, 202, 229, 231: n = A,T,C or G
taccttgcccattcgaccaccangcgaaacatcgcatcgagcggagcncngtactctggatggaagcncgggcttgtcgatnaaggatgatcctggaccgaanagcatcanggnctntgngccagaccgaactgttcgccaggctcaaggcgccgcatgcccgacggcgaggatctcgtcgtgacccatggcgatgcctgcnttgccgaaatatcattggtggaaaaangngccgcttttctggattcaatcgactgtgggctcgg

SEQ ID NO: 4116 - DNA, 367 bp, Homo sapiens
  misc_feature 141, 158, 350: n = A,T,C or G
gttcccttctgacaacagcaagggcttctaatgtgaatgaggctcaggggaatctgctagctatctctggcttccctggcaccatgcaaagacatgctcctgtagaagagaatattgaaagccatccagaccccagctgtngcagcactggaagccanaatggttttctcatggagaattcctgaaggacctcctattgagctcacctgagtgacatggaaggatgacatgtgggacaatcggagtgaacctggggtggtgagaacactgcaggcatccagtggattcctttaaagcaggttgctcaactgtggtcctgttgacgtttcggctgggtgattctccactgngggggcctaactggatg

SEQ ID NO: 4117 - DNA, 461 bp, Homo sapiens
ggcgtgcagcagagcagcggacaaagctgcagggcgaccatatcacgcaggatgctccggcggtggcaacctgagaagctcaccgtttataactaagcagacaacatgcgcggtcctgtgcccatcatggctggtggaacgagcctgccgaatccacaacacaaatgcctgagtgtgtgcgcgagtgcaggtccggaggagcatttcaagggcattgcaagggagggatgctggccctcgttctcaagaacaggatgagcagtcacctgcacatggtgccccagatacatgggaatgatgacatccacacaatggtcctttgctttctcaggaaaccaagaaaggacaatgggtgtgggttgttacctcaagtgtcttggagcgaagttacgctacctggactgactgtctgattcacactgaattacaggagggagaaattgggttgagtcttcactcaa

SEQ ID NO: 4118 - DNA, 202 bp, Homo sapiens
  misc_feature 29, 43: n = A,T,C or G
tgagtttcctactatgttttccccatgtnctgcaagaagctgngggaaaaaaaagatgaagccaactcccaattaccactgtcaaagctggtgaaacaagtcagtcaccaaccttcagggtatgcggcatgtaagggcatggaaaagaaaacaataggagagccctcagcaaaaaaaagcacccacattttaagaaaaagaa

SEQ ID NO: 4119 - DNA, 144 bp, Homo sapiens
  misc_feature 34, 57, 58, 78, 82, 86, 89, 90, 91, 101, 104, 111, 128: n = A,T,C or G
ctgggcacttactcagagacttattgtttatcancgcaattggagtggagaatattnngaagaggacactggcctttngggnatgnatnnntttaatttcntancttttcntttcaacatttccacantgttacccttaaggga

SEQ ID NO: 4120 - DNA, 447 bp, Homo sapiens
  misc_feature 347, 368: n = A,T,C or G
gtaggactgcaatgctagaaacacatcctactctgtggagaacaacagcactgcaaatccgtggtctctgctctcacctggccctcaatgctgctgatcagcgcacaccctcctccaaatcccatgcgccagcctctgcacaaccttgaaccagcaagcttgtctccaccacagagaagcaagattccacagcgggaggagagctttgtggagggaaagcaatgtggctctgtgaaggacactggcctggacgtcaagggcagatgcgggccctgctgctgcccctcctcgctggctctcaatctcatcatcctacattgacaggcctggaccagatgacttctgangatccttttaacttttcaacntcatatagactataaataagtcaagcaaagacaaattaggagaaaaataacacactttatagccaagtactattttaat

SEQ ID NO: 4121 - DNA, 459 bp, Homo sapiens
  misc_feature 30, 32, 33, 35, 42, 54, 73, 77, 81, 94, 123, 132, 136, 141,152, 153, 154, 163, 164, 179, 182, 195, 223, 224, 228, 241,263, 268, 303, 314, 338, 341, 359, 368, 370, 391, 392, 397,406, 407, 426, 444: n = A,T,C or G
ccttccacctacagtccaggtgggtggggngnnanaggcctntgggggaccagngaccgggacccaaggctgncctnaggncacaccatatgcnagatgcggcggccacctggcgagggaaanggactggcnccgnaccanagaccaggtgnnngcttgcacnnaccccatcacctggnaantgcagagacagcnctctccctgctcttgaagttgagaccgnngctncaacaacacccangacccacagctggtgttcctgncatcntacctgacttgaattgagcgagtcgctgcctttanaaggctttggntctaaatgatgcaatagccggacnatntttttgatgggggtaaanttgcccaancntttttttattgggaggaaatnntggtncaggagaannatactttaaaaggggcccngtgatttctaccttgganttaaacaaccttaaa

SEQ ID NO: 4122 - DNA, 258 bp, Homo sapiens
actgaaacctcttcatgaaaaatttacaatgctcctctgtgttttggagtcagagggcaatagtagcaaatggcagacagaaaccatactttagatttgctggcagctacagaggacagaaaacacttccaaggatgggaagaaaaaccctcagctgcatccccaggttctacatttctggctttataaagatactaattgtcctcaccagcagaagcatagtaaataataaaattttaatttcagcttaaaaaaaaa

SEQ ID NO: 4123 - DNA, 498 bp, Homo sapiens
  misc_feature 419, 448: n = A,T,C or G
aacctgcttagaaaaggtgtgacattgctgcctttcagcagaagatcgctctgggtgttgcagctgccgtgttctagctcaactgagtctgatgcctccatctgcctgcctcctgcattccccagctcatggatctccatgcaaaatacctttagaccatttgcactaggatctgtctaatctcgttagatttctcattttcagcataatactgtcatggtgctgtgcaccagtgccccagattagtggcttgtcagaatggtgccccactaatgagctaatccaaataatgctcaaatcccaaatcagatttaagacgatccagtctgggtagaattagggagcaagaaatcctggcccaaagaacaagctttcattttctttgtttcgccttaaaacaaaatagggggagtgcctgncaaactccagactttttttttccctttgnatgacattaacctccattacacaattgggaataataaaccggaaaagagt

SEQ ID NO: 4124 - DNA, 201 bp, Homo sapiens
gtgcacaatgcttctttgagtatctccgtgtctgtggctgatatccagatgcaaggcttcttccgggcatccctgggaatgggagtgcatagacttactggtcaaattacagcacagcctctacacctttactgaagatggaaaactgttttccaaagttgacttgcctaacatgatgtaactatcatgcaaaaataaaaa

SEQ ID NO: 4125 - DNA, 458 bp, Homo sapiens
  misc_feature 38, 62, 69, 72, 73, 77, 84, 88, 92, 97, 98, 101, 115, 129,150, 153, 154, 165, 168, 174, 190, 194, 195, 204, 215, 228,250, 259, 263, 272, 283, 318, 326, 328, 330, 347, 353, 361,372, 379, 391, 420, 422, 441: n = A,T,C or G
gagtgactgaggatggtactgcctcatcctgatgaatncacgtgtgaccgtattattttttngggctanaanntggntgtctgntgtnattntcaannaanccccaaaaaccccntgactcttttccanggagaaatgacagctcccccnttnnactgaatagcnttnaaaccnagggctctgatccagngagnngcctgtcantggagagatanccccttggggccnccaagtccccaaccagcccagnccatgattntaancaatgaatncccatgggctntaggcctcctttgggttacagcccctcacaagacntttaagangngnaaatagaactggaagancccctnagggttanccgggcccaanccccccntttttggcaaanaaggaaaccgggggcttgttaacatggtntnttaaaaaaacctggggcangggggaaagctaaaacc

SEQ ID NO: 4126 - DNA, 381 bp, Homo sapiens
  misc_feature 28, 39, 48, 58, 67, 68, 96, 107, 110, 111, 144, 147, 157,169, 173, 186, 208, 211, 213, 219, 235, 237, 239, 243, 250,260, 264, 276, 286, 290, 307, 311, 323, 330, 331, 338, 363: n = A,T,C or G
caccacatcacgggtcctggctcggacngaatacccttntggtcaggnacctgccggntgagcttanngatgaggacaaagaggactaaaatgaantacctctcggntcnntctgtgcggctcctttcttctaaaacaaaaggnacnaagtctaaantaagccaagctntttnttcccaaaagccncaataaaggcctggacaagagnccntnaactgnagtttttaaggccgtngncncaanacaaggngctttcttgncttnttttactggggnggcccccccncttnaaaaattcccggcgggnaagnctaaaaagtttnccccggnnaactaangggggaaaaaccccctggggcgggngagaaacccctcaatttt

SEQ ID NO: 4127 - DNA, 374 bp, Homo sapiens
atgaggaaactgaagttcagagaggctgacccgcccaagatcacaaaatggaactataaacagaattcaggtcttcagtaaagtgctctacaacagtattctgcttctcaaacaaaaaccacccatttcagaagacaaactgttgcagtatccatgggtaaaagagggagtgaagagctgggctagactcttcaatcagagtaaagaggaaatggaagccgataagggacacttggataaaagaatgatctaaacatgtaaacatttatttctgctgagactttgtgtttaatactgtctaatgaaggttgctttttggactagaaagtagtatattggagaaaatattgaaaaaaaccccctggaaaaaaaaa

SEQ ID NO: 4128 - DNA, 486 bp, Homo sapiens
  misc_feature 18, 28, 30, 52, 53, 66, 87, 88, 90, 99, 128, 131, 138, 144,155, 159, 166, 184, 260, 302, 390, 399, 400, 401, 402, 414,431, 453, 462, 469: n = A,T,C or G
gcccccatggccgaaacnaccccgaacngntccccaaagggcgggccgcttnncaattcatgatgnccgattaaatgggcacgggcnngnggcttttgnagcttggtcacagtttactggatctgctntgnttggtcnggcctnttattgggganggcntgaaagnagcaagcttttaccaaanggcttttggctggcaaaatgcttcttaccaaatgcttcttgaaggctgcattcaaaagattaccacacttttcagnttaaagcaagaagcaattccttggccccaggcttttgttaanaaggacaagctgccactaacctggttggaattcactcatctttgggaattgctattccaggttccaatggaggtttttttcccccccnggggaattnnnntttgggttaaangccggccacatattccnaaaaaagggcctttgacgcaanggggccttnaaatagnttaacctctggctggag

SEQ ID NO: 4129 - DNA, 214 bp, Homo sapiens
  misc_feature 21, 22, 35, 42, 54, 62, 96, 99, 107, 108, 112, 117, 131,137, 142, 152, 166, 170, 173, 180, 192: n = A,T,C or G
cttttccatttcttaactttnnttttggaccattntggggtnacaatttccccntttggaanccccctggaaagaacaaaagaggcccaaatcaantgnctaatttnnaccnggggngggaaaggcggccnttgggnaaaanggggcttagntttagcacttgggntttnaanaaccccntttttttgggcnaaaacccaagtcccaaggaaaa

SEQ ID NO: 4130 - DNA, 228 bp, Homo sapiens
  misc_feature 21, 35, 59, 69, 70, 86, 93, 98, 109, 122, 125, 141, 158,165, 168, 169, 172, 177, 189, 196, 199: n = A,T,C or G
aaggcgcagaaaagggaccantccaaaaaaccaanagtcccacagtctctctcatttcntgttaatctnngctctatcttagaacnctgtttnttttntatcaaaggcncaaaggagagggntcntacgcctgtaatggcngctctttggagaggctngacacangannctntgctnggggccaaaatntcaaacncanccccggtttttaaagggggggcctttttt

SEQ ID NO: 4131 - DNA, 393 bp, Homo sapiens
  misc_feature 19, 36, 47, 67, 72, 84, 86, 91, 97, 99, 102, 105, 114, 131,137, 139, 145, 153, 158, 160, 163, 175, 190, 211, 216, 224,247, 250, 291, 300, 301, 306, 307, 322, 347, 348, 367, 377,378: n = A,T,C or G
ggtggcctgggacaaatgngcccaggaaaaagccanagacccggagngggggggacccccctccccnaacangggtattttatncnccttntttaantnggnccntttttgagngcatcacataaccacgngaaaancnctaacnttgcgggnaaaancnttntttaaagggttnaaaagggttgggggncctgccccccccggctccgtnggggntgtaaccncggcccaaaactttgggattggnccncgaaaaaacccccacccccaaggttttttttttggggaggnaaagggccnnccccnnttttcccaggggggntggaaaccttggaatggaaaaaaanngggggggccttccaaaagnccccccaaanngggggggggagacat

SEQ ID NO: 4132 - DNA, 168 bp, Homo sapiens
gctttttgtgaaggtaaaatggggtttacctaacgtgctgaggacagtggccgacacagactgaagagaaaatagagttattatgggtctactcttcatgaattatgaagacatcaaattggtgggatccttcaataaagaatttatttttaaactctaaaaaagaaa

SEQ ID NO: 4133 - DNA, 351 bp, Homo sapiens
  misc_feature 25, 31, 48, 49, 81, 101, 128, 141, 146, 152, 158, 160, 163,175, 191, 198, 202, 212, 213, 217, 218, 219, 239, 240, 246,260, 278, 285, 291, 324, 325, 336: n = A,T,C or G
acttgaacttctgactttatgcgancccctngccttggcttcccaaanngctgagatgaaagacagtgagccaccgtgccntgcctaataataactctttnaacgaactgccattcaagaaaattgtnaaatctaacttangaccnggaacnccgctnancancagtgtggcaanacccatcttgaccgantgaaccnggtnggcctctgannccannntgaaacattatcacccctgnnacttgnacatatacgaacangtggcctgcaggagccangaaagtntggagnaagacaaggaaagaaccacaggagaaaataaanncagcagtttcngcctttaactggaaa

SEQ ID NO: 4134 - DNA, 285 bp, Homo sapiens
  misc_feature 22, 70, 86, 87, 88, 95, 96, 105, 123, 124, 130, 134, 142,148, 150, 151, 153, 154, 157, 158, 190, 207, 236, 246, 248,262: n = A,T,C or G
cacggcccttggtgagcacagntcagcctggtataagttacaagcatagaattggccaattgcttttgcnttttaccctggaagannntactcannagccacctntgtgtatttacccccagnntttacntganaaactggngggagncnncnnaannctctgggaaaagaaaaaggaggcactgaaaangttaatcaccaaagctngaataaggtttagactcggcaaagacttnaacaaagcananctcaacatattaangatttttcttgaattatggattg

SEQ ID NO: 4135 - DNA, 159 bp, Homo sapiens
gagagctgcaggatcacgtgggatattcctttagaagacatccatcgtattttcctgctttcctgtcttcatctctacacagggaaccttgacatttttcccctttggattgtttttcaagtataaataaatcagaatccccttgaactgaaaaaaaaa

SEQ ID NO: 4136 - DNA, 321 bp, Homo sapiens
  misc_feature 22, 27, 28, 31, 34, 36, 38, 46, 48, 56, 65, 74, 77, 78, 79,94, 103, 105, 106, 113, 121, 123, 135, 196, 199, 201, 240,302, 306: n = A,T,C or G
tcacaatggggggcgctttggnccagnntcntcntngntttatttnancctggggnaggagaacnagggggatncgnnnggactttttgccaangttaccccngnntcttggncggggggngnggactgggggcnccttttggaggcaaggttcaagcctggggtttaaggtccaaggcttgaaattggggcctcngcntngccatttaaaatggggcggcggccatgaagaaggggaangcttttgatggggcttgaagcattggatgtcttccctgagggaaataaagattctaaagccncctnttgttttttaccccc

SEQ ID NO: 4137 - DNA, 250 bp, Homo sapiens
  misc_feature 52, 55, 63, 73, 80, 83, 95, 98, 122: n = A,T,C or G
gggaagccattctgtgaactgtcctatggagaggccagtttggggaggaatngangttttttntcaggacccntgaaagnganctaaaaaggggntcntgccccctcagggaatcctgcggntccaagtgacagctttgactgcaacatcatcttgagacccttaagaagggagccaccttgcttggcccagtcctggatccctgaaccctcggaaactgtaagataataaatgattatcattttcatct

SEQ ID NO: 4138 - DNA, 123 bp, Homo sapiens
gacatgcgggccagtatgagcggagaggttcccagcaccgtcacaagcacctgtggctgttgacaacaccacacacatgaaatgatgctcaccagaatcaaaatactcagctaaacaaagaaa

SEQ ID NO: 4139 - DNA, 355 bp, Homo sapiens
  misc_feature 24, 39, 87, 105, 109, 110, 123, 129, 147, 159, 191, 197,207, 216, 224, 228, 273, 293, 314: n = A,T,C or G
accttttggaggcagggttcaagncctgggtttaaggtnccaaggcttgaaattggggcccaaattcttttggcgtttttacccctnggaaaggaaaaatacttntaanncccacccttttgntttttnccccccattttttagcgnagtaaaaaacangggtgactttttccctatggaagtttttttgntcgggnaaagggaatnccaccgaanatgcttgngaanaccgggtgggggaaacaaaagatcctaccttgtccttccacaagnttcattatccctgataaaanaaatgccttgtaacctccaanaaccggacaaggtcatctggtggtcactctcaaagggaacc

SEQ ID NO: 4140 - DNA, 193 bp, Homo sapiens
  misc_feature 24, 49, 55, 60, 64, 69, 79, 87, 92, 93, 102, 103, 104, 117,118, 120, 138, 157, 166: n = A,T,C or G
ttctgccctgtctgagctgactgntcccaaaggacacttggctggtaangtttangcaanggtngcccnttcttaatcntccaaaangggtnngccccttgnnnaatgggacaaatnntntgggttttaacctggganaaaaactcataagccaccnctgggattnacccccaatctttgacaagaaaaactg

SEQ ID NO: 4141 - DNA, 116 bp, Homo sapiens
  misc_feature 16, 21, 26, 38, 61, 73, 77, 82, 83, 88: n = A,T,C or G
ggttttaacctggganaaatncttcntaagccaccctnttttatttacccccaattttcanaagaaaaactgngtgngcgcnncaatnaacaggagtgcttataattaaaaaagaa

SEQ ID NO: 4142 - DNA, 188 bp, Homo sapiens
  misc_feature 81: n = A,T,C or G
ctgacatggacagaacttccagcaggaccttgaatggttaaccgcattacaagatgcccagaacctctgtctacctaaagngccctcaagtggactttgtgaaagcagagtctcacctccaggctgggaaacatcctggactattacatgaacaagaaaataaacttcactggtgctgcaaaaaaaaa

SEQ ID NO: 4143 - DNA, 171 bp, Homo sapiens
  misc_feature 27: n = A,T,C or G
gagcttcttacatcatgggtttgcagngatgggcttgctacagctcttgggacattcaccatcaaaaatattgggcaagaaagcttaaagccagggaaaggaacaggaagaaagggagggccaaaaaccaggcttttatttcactttggtgggcttctcattatggaaaga

SEQ ID NO: 4144 - DNA, 150 bp, Homo sapiens
  misc_feature 17, 49, 58, 63, 71, 77, 86, 87, 91, 95, 105, 114, 128, 131: n = A,T,C or G
gggtcgggccccttganatgcctgggagccacccctgggttacttgccntagcttggncttgngccaaatncctgtntggcgtttnntacncttngataggaaanttacttcgntcaccgcccctctnctngtttttccccccctctgtg

SEQ ID NO: 4145 - DNA, 199 bp, Homo sapiens
  misc_feature 28, 35, 47, 61, 121, 150: n = A,T,C or G
gataactcttctctgttgactgggatgnctagagngctgggtaatgnacaaggggctgaangttttcacttaccatgtgttgtcacatctaatgggacttgacagccggagtgtttttagncactaaagttaagtatttgcaacttaagngttttcccataaaacctcatggaaatgtaatgcaatgcaaatactgcaa

SEQ ID NO: 4146 - DNA, 154 bp, Homo sapiens
  misc_feature 50, 75: n = A,T,C or G
gtgagggatgcaaagaaaaagtgggctggcctgcaaaccaggaaggaaancccttcaccaggaaccccaatttanctgacacttttgaactttggactttcaaaccctccagtattgtaaataaataaaatatgttttcaaagtcaaaaaaaaa

SEQ ID NO: 4147 - DNA, 189 bp, Homo sapiens
  misc_feature 53, 91, 92, 143, 146, 147, 149, 155, 167: n = A,T,C or G
cttgactgacccccaatttttatgccccagaagtagatgacaccttggagccnaataaggacccctattcttaaagacttgtgtcgccaannagagtcccttgacccgcaccaagaaaaaacgttgggactcctaaaagttanaanntngatagnttttgttggagngtttaaatgcccgaaaaaaaat

SEQ ID NO: 4148 - DNA, 136 bp, Homo sapiens
  misc_feature 87, 96, 101, 104: n = A,T,C or G
ccctttttgagcaaagttcagcctggttaaagtccaaagctggaaattgggccctcggctgggcccatttaaaatgggcggcggccntttaaaatngggcnggntttgggccaaatttttttgagttttttacccc

SEQ ID NO: 4149 - DNA, 291 bp, Homo sapiens
  misc_feature 19, 40, 44, 50, 51, 59, 60, 66, 97, 112, 124, 140, 165, 219,230, 231, 239, 265, 273: n = A,T,C or G
ttttgggggggggaaaatntttttccccccggggccccanttgncccctnnggggtgtnnaaacgnggttttttccccgggggggggaacccctggnacccaaaggggggtncccccccggggnaaagccccattggggnccttgggatttttccggggggtttnggggccccctttcttccttggcaagccccccggaaaggaaggggcaagggggcntttgttcttgnngggaattnccccaaaaatccgggttttgtccggnaaaagggnccccgggaaaaaaaagga

SEQ ID NO: 4150 - DNA, 410 bp, Homo sapiens
cattgctacaatacaactgaaaacttgccatctgcaccctatactaccatctgtggaggaagacacgctggaccagagaatcttaatgtctctgccaacatcagattcagctgagagaagaggtcacccagccatgtccccagaggccccgtccttccaagacgtctgtcctctgttcctttgagaggctgaaaacagcacaagaatgccaaagggatatggattcctccttagtacttcataatacgcaggctacctgctattccttgtctcttatttcttccagggaaaaactctgctgctttgcttaatgaagtcaaactataatttgagagtggggggaaaatacagtcaatacagtctaaagaaatgtataagaatgaaaaagactttggtgagatttcccccac

SEQ ID NO: 4151 - DNA, 335 bp, Homo sapiens
gtgacaaagaacgtcaccatcatggaatcaagaaggaatcttttggaaaagttttcatagacatctctgagaagaccttggaggctattggggctgcttaatgcctttatgtggaattaatggactatttttgcttccttcttttcgttttaatgattttcaaggtaaacattggagacctagatgttaacttttctgttaccatcaagaatgtagtatttctgttttcctaacctgccatctcaccaggattagcccccttctcttacatcctgagattattcaaggaatacagactttgaaccaatgtaaaatacattttaaaatgttaaaaa

SEQ ID NO: 4152 - DNA, 232 bp, Homo sapiens
gttacagaccacttactctaaacttcacaaatggttctgaagagtatggagcctacgtagattcataaggcctgttcttataaactgaagaggtaatcaatcactctggagatttctacaaggtaattactgtttattctttaatgatagtgccgtcttcctttcttccttcacaccagccctttgcagctgccacctctaagaaagcaaataagctacagttaaaaaaaaa

SEQ ID NO: 4153 - DNA, 207 bp, Homo sapiens
  misc_feature 22, 36, 37, 77, 88, 100, 135, 145, 149, 152, 156, 163, 167,172, 182: n = A,T,C or G
attaagggatcatctatttccnaagcctgggcctcnnatgacccctatacctaacttctttggggagacccatcaangcttaacaacnattcatgcaaangggggctcttagccccgttccaggggaagaccccnccccgggccntaanggngctnccttgcntccnttaancaaagcatantgagagttccttgatccccaatagg

SEQ ID NO: 4154 - DNA, 343 bp, Homo sapiens
  misc_feature 25, 41, 43, 44, 49, 75, 95, 106, 112, 122, 127, 152, 172,187, 193, 224, 227, 229, 230, 233, 244, 245, 250, 256, 270,289, 324, 326: n = A,T,C or G
atttgttccttgctacaatggaganctgaatctagacaccntnnaaganagtgtcctcatgcctcaggataaganaatgctgcatacattcactngtaaaggggantgcacntggcctattnacatncggcacactcgtagccagaggtggntcttcgcaactaccactagngaacagaacgggtcnataatnaccagggatttaacactacaaaacaaaaggnctngnngcntggggactcannccttnatagangcccacaaggatgnctgctaccacatgtaaagngccccaaagcaaggacaaggtgcttacaaagtggngncccgaatgaataaaggg

SEQ ID NO: 4155 - DNA, 236 bp, Homo sapiens
gcaacaacccgactggtgtcccaggccttttgggaggcctgaagcatatgctcctcttgtctggagccctgagtcctgggaaggcttccagacactgctggcctacctgcacttcctagagctgcttccgctttgggaccacttgttagaatcgagagcagaattttttcaaatctccttggactctgtgtcttagtgactacccagacaagaacaacaataggtaaaactaaaaa

SEQ ID NO: 4156 - DNA, 308 bp, Homo sapiens
  misc_feature 25, 51, 62, 72, 83, 96, 102, 119, 123, 130, 138, 145, 149,178, 185, 202, 208, 211, 218, 233, 234, 235, 265, 268, 278: n = A,T,C or G
actgtccttggaactggggcttaanggagtaaccttcaatgttgcgaactntgacaccaatnggcaggacgntacagtgcacnatactggcccacnggggcncgttccattcctgttgnatgncactgantgtgcacncagacgncatnatagattgaggaatttctggaggcaatgntattgcncttccattaaccccatnatgggnggntatgaancctgaaaccaacacnnntgggctgtcatatttgggcaaatttttcgnctnctcaggaatntagacccagacttattgacactctggagaa

SEQ ID NO: 4157 - DNA, 118 bp, Homo sapiens
  misc_feature 44, 46, 50, 51, 53, 57, 67, 72, 80: n = A,T,C or G
gattgcttgaaaataaggccatcgaggcatttgcaagatggggntnaccnncnctancttggttaanaaagngggggccncccccttttttttgatggccatatgtcccaggattatg

SEQ ID NO: 4158 - DNA, 137 bp, Homo sapiens
  misc_feature 51, 52, 69, 73, 78, 91, 97, 114: n = A,T,C or G
tcttatcacgaccccatggcttacccagcacttaaaagaggaacctgccanngtgtgcacacactattngctntaccnttgggagacatanggaatntgacttcaagagaatcnccctgagtggatgtaaattatgc

SEQ ID NO: 4159 - DNA, 150 bp, Homo sapiens
  misc_feature 29, 37, 38, 45, 57, 59, 60, 65, 68, 69, 75, 123, 130: n = A,T,C or G
acctgcagacaagcatgatcttgaacctntctgctannctccacngtgcatgaatananntgganganngtgccncacctgaatacctatgtaagcgaaacgaggtattcttgaacgcccaanacgactntgatcggtatgtccaggaaa

SEQ ID NO: 4160 - DNA, 204 bp, Homo sapiens
  misc_feature 37, 59, 74, 80, 88, 93, 97, 107, 112, 115, 131, 138, 142,157, 160, 165, 167, 171, 176: n = A,T,C or G
gacggggccttagtttgctttggggggcgggacgtgngccccaaatcatgtctccgggnctttacaaaggtttncccccnaggggggnggganctanaacgccccgngggcnaantcagggtttctttctnggcccgntaanagggatttgcccttnccncctgntnggancgganccaactattaaaaaagcgggtttggcat

SEQ ID NO: 4161 - DNA, 489 bp, Homo sapiens
  misc_feature 29, 30, 43, 45, 46, 47, 51, 55, 58, 61, 63, 75, 81, 83, 104,108, 116, 121, 205, 234, 254, 266, 269, 288, 290, 291, 302,307, 332, 333, 335, 362, 368, 390, 392, 408, 409, 428, 452,462: n = A,T,C or G
tttggggggagctaaccttggcttttaanntcccaaaaacttnannngggnttcnatnccncnattggccggggnaaggancnttgggggggacccataaattncacnaaactttnccaanaacttggcccctttttgaacaaggcccgtttccccaccccgaacccagacttataaaactggttgggctgaaacttaccttggnaattttcacccccttttttgaaaaggganttggcccgctttaaggggangggggaatattnctnttgtggtgccgaaaagggnannccaagcggggnggggnccaaatcccttttggccccacaatnntnggggttgaacaaaaacttgggggaatngaaccnaaccggggctttgaaaaggcancngtttccccggggaaannaaatttgaacccggggctntaaatatccccctttttcttttgnggcttcattncctttttcccaaggattggggaaaaag

SEQ ID NO: 4162 - DNA, 474 bp, Homo sapiens
  misc_feature 75, 92, 110, 146, 183, 195, 203, 257, 289, 333, 355, 360,394, 397, 433, 440: n = A,T,C or G
aaaaccattgttcttattgccccaaaaagggtaagaagtttctggggataaaaaaaccttgggatgaaggaaaanggggttttggaaaagtngggaagacttggcggggnggatgaatgaaaaaaatgaagtggccatttgggaangctcttggtggatgggaatggataaaaagtggaaaanaaatcaagcttnccgctttnctttgcaaaaacttggcctatgaatctgggatggtgggatgaatgcgcctgggnaaacaagtcaaagccaaggccaacttccgaanggaccaacgaagaataaagccaccttttcacaaaccttcggggnaaccgttcattcccccgcttgnaagcnttcttcaccaacattgggccatcttcgggggggnggnggctttctttcttttcttgggggccacttgactggncttgggngccccaacacaatggtggcttgcccttacaagca

SEQ ID NO: 4163 - DNA, 212 bp, Homo sapiens
  misc_feature 24, 34, 43, 44, 70, 81, 90, 93, 109, 112, 123, 150, 169,172, 180, 183: n = A,T,C or G
gttttgcttgaaaagggggggttncccaaaaggnccccgcctnnaattttaaaacccccctgggggggtngcttcaagccncccatttanatngcccttttccggaaanttnccccggaaaanccctgggttgggaaacctccgggaatncctttttttggggggatcnccnaaccaaanggngtttgggccgaaagaattttggggttggt

SEQ ID NO: 4164 - DNA, 161 bp, Homo sapiens
  misc_feature 22, 30, 31, 33, 93, 95, 101, 106, 136: n = A,T,C or G
cgctgggaatattataaccatnccatatcnnanatggatgagcccgacatctctgtgatagtcctgaaaagatatattgaatcgaaccccggncntccttnacatnatgccgtgcataggctgaactaccgggtgnaggaccctggacattcgaacaatac

SEQ ID NO: 4165 - DNA, 353 bp, Homo sapiens
atcctgggagctggcgagcatctccaggatcctcaggttcgtcccaggaggataagcagcctgtgagtcggtgctgtccctggctaacggctttcctgggctgcctccacaacccaggacctgccacacacaagcaaggtatgaacaaaagaaacatgcttcacttctgggcagaatccccaagagctaccatggaggtcctccgcttctcttttctccctaccacaagactgacatgactccaagagggactgctcctttagcctgggtccctagaatgaagattgatatgcagaaaaacttcagccagcctgcaatggacttgtgggggtagcaataagctttttggtggt

SEQ ID NO: 4166 - DNA, 433 bp, Homo sapiens
  misc_feature 179, 249, 351, 385: n = A,T,C or G
gttctactgagacgtgaactgcataccagcagagctgtcttcctcaggatccatgaagaccagcccagcaagcgccatgcaaaggacaacactaccagaaagtgtaccttcataacatcaccagggcacagtccaagtgttatttcagaaacaagagaaagaaaagtcaacagacaaanggtaaataattgaaaaacgaacatgacaacaaagtatgggagtgaaatgggtatgtggtcttggattggncttaaaatactgcccctctttccccagaactaagtaggggaaagggagagagagaacaagaatcccagaaagttgattgttaatgctgggagatacggattntggagttcattctactattcactttacattctgngtttttttaaactgccataataaaattatctttaacttgaaaaaaaaa

SEQ ID NO: 4167 - DNA, 115 bp, Homo sapiens
  misc_feature 18, 21, 41, 49, 60, 86, 88: n = A,T,C or G
ctgctagaagcacagaanttntttgaaataccaagttttgnactttaanattcatggaanctttgcattctatggcataatagatncntgtttgggttttaacgggaaaaaaaaa

SEQ ID NO: 4168 - DNA, 272 bp, Homo sapiens
  misc_feature 30, 34, 40, 56, 91, 106, 108, 112, 117, 149, 153, 177, 182,211, 213, 218, 219, 228, 235, 249: n = A,T,C or G
gggttggagctttttacccacaaggggcangttnttaaantcaccccgtggtaagnggggcaccggacgggccacaatttaatggcttggnggtaacaaaacaagncntcangaagncccaccgctttgtgttgttcgcccaggccggnggcnttgttccattgccccaaggccccncaaanaaaagggcaagggggaaaagggcttggancnttggnnccttgtggncccctcntggtccccttttcnttatgaaaccctcttaaaaaagc

SEQ ID NO: 4169 - DNA, 533 bp, Homo sapiens
  misc_feature 27, 31, 32, 33, 34, 39, 40, 41, 43, 44, 46, 48, 49, 51, 53,55, 73, 113, 114, 179, 188, 198, 210, 227, 239, 244, 279,290, 307, 313, 339, 357, 368, 372, 385, 394, 401, 417, 425,434, 451, 471, 481, 488, 494, 501, 502, 511: n = A,T,C or G
aagcacttggagagcctcaagaatgcnggcnnnnctttnnncnngncnngnantnatttttatacctttgganaaaatgggggtcaagggagctggaaaggaacatggtccannaaaacatttgtaatgggccatcgcttgggaaaccaaagtgccgacctctcaaaaatattttaagnggggggttncccttgaaanggatgcttaaanggaatacccttgaaatncattaaggtggnccatngggggtggaagaacaaagtgccaaaaaaatggctntttaattatcngaagaaacttcttttcnaagggnaatcaagcccggccagaattccccanccctttgggacccccccntggaaaaaatngggnaaacaaattgggnaccaaatcnaaaaggnttgaaaaagcccaaancattgccnaagcccaanccccccccggtgcttgnttgaccccaaagggggccgngggtcccacngggtacntttggnaagaaannccaagaaanccccccaattccttgggggcac

SEQ ID NO: 4170 - DNA, 166 bp, Homo sapiens
  misc_feature 117: n = A,T,C or G
ccttgcaaactacaattacctttgaaagaaatctgtttctacctggatgactatatcccatatcttcatgccactcaacttcttgtattcaatcaagaaatatgtattgagccccanctatgtgccaaatactattctaggacaaaatagcagtgaagaagaaaaa

SEQ ID NO: 4171 - DNA, 169 bp, Homo sapiens
gttggctctatggaagtttacattctgcactattcttagctctcgcggctggagaatcccggggagtcctcaatgccaaattccaggacatgaggctaataccactgtttcaaacttctctttttaaaataaatgcatgattttggaagattttagttatcaaaaaaaa

SEQ ID NO: 4172 - DNA, 389 bp, Homo sapiens
  misc_feature 24, 288: n = A,T,C or G
ctctttcaggagcagacattgtanataggagacatcagtgaatgaatcctgaaaacgtgaatgaacaaaccagcaacaatgaagtcttccctgagtgacagccccccaacccactgccaccccttccacccgtcacccaccccccacccctcactcctgtttccaagtctgaattaattatttccttccttttgccatttggtttggagctcacatatcagacttttcattatgtttggtactcaagggctttaatgtcctgtttatctttgtacattcccaacgctntgaaccaccatcagggcttaggataatgctttgctctcagcacagctttaaatatgttaaataagtgagtattttcctttagcaggaagaaaaatgaacaa

SEQ ID NO: 4173 - DNA, 184 bp, Homo sapiens
  misc_feature 41, 73, 112, 119, 132, 140, 168, 169: n = A,T,C or G
tgcctggcgttacttttcttctgagccctcccctgcccaangagccctgggctatcagcaacagcaacatgantgttggctccaaaacacagggagctagacctatgccctnccaaccntggagttgcaagntagggctntgcccatcacctccctttcgccaacgtnnacaccctcgagctga

SEQ ID NO: 4174 - DNA, 223 bp, Homo sapiens
  misc_feature 19, 24: n = A,T,C or G
agagtggcccaaactgcanatggncctgcgtgaaccatacctggggcaggtgaggagcattgcagcagaatgcaggaagtggagatttgaggccacctggcgtcaaggtcctaccggtttccaagcttcctcttttgatacagatatgttgcccccagccttggcagtctgtgcctatgataggaaggacagcacaaataaacactgaaaggccaaaaaaaaa

SEQ ID NO: 4175 - DNA, 395 bp, Homo sapiens
  misc_feature 27, 40, 47, 54, 62, 67, 83, 95, 100, 121, 124, 127, 131,132, 147, 150, 151, 167, 187, 189, 201, 203, 205, 213, 219,247, 262, 281, 282, 283, 287, 288, 300, 323, 330, 335, 342,343, 346: n = A,T,C or G
ccaaacaggatagaccaacctggatgntacacacagctancccattntgactcntcaaaggncaaanaaagcccctttcaaanaggcttgctttntgaanagacttccatttcatatgacnttncanaatnngcctaactataggcnggnnacagggggctcacgcntgggattcccagcactttgngnaggccccatgtncncngatcactnacgccngggagtgcaagaaccagccctgggccancatggtgaaaacccntctctatgaaaaatgcccnnnattnnctgggcattggnggtgggcaccctatggatgcccnctcctcngggangctggannccnaaaaatcaattggaaccagggagggcaggggttgcaatgagcctgaagg

SEQ ID NO: 4176 - DNA, 186 bp, Homo sapiens
ggtgcccgccggcccctcccttcaagcctcacggaattgaaacaaggggctgcaggaatcgattctccggccgaaagacttctccagtaagggagcttcccaggctccatttcacaggagcaccggctgggggaggaccgggagggccttcattatgcagtcattacagagtctcatcaaaaaaaa

SEQ ID NO: 4177 - DNA, 103 bp, Homo sapiens
  misc_feature 21, 39, 45, 57, 78, 81: n = A,T,C or G
actgggggagaggcccactgngtagggaaaccggggcanaacagnttaaagccaaangccaactttaaagtagtcccntgnggggtgccaaacatgtaaataa

SEQ ID NO: 4178 - DNA, 406 bp, Homo sapiens
  misc_feature 334: n = A,T,C or G
gtataaactactttgttgatgattttcctgaaatcacagtaaaaccgttcctggttatcgcagtcagcagtcaagttatttggtagaagaatcagaagcaaaagctccaccagagtggggtgagggtccccctctgtcaaactggagtggccaagagttgcaggaagtaatctctaggaccatcagattctccaaagtccatgactatggttggtctgaaataacttatataaagaatacaattaaagaagtttccactttcatattcagtatccttccgacactcctgtagaaagacccagggcatgagtgaccacagacttgatgctgtctnaaccaagccgatggctctgacagaacaattgctttagtcatgcagattgtgcaagaacaggtgacatctatt

SEQ ID NO: 4179 - DNA, 302 bp, Homo sapiens
  misc_feature 196, 212, 236: n = A,T,C or G
gaacatttggtctattgccaagtatgcgataaggttacagcactgaaaggctacttaaaaattttttttatatgatgaatgaatgactctaaaaaaattcacaaaattctttgttttgcatacaaagtccatcaaggatgaaggtggtctgcaagttgaacttagtactatgtgggttatagtctttgtttgcagncttaactggggattgnaccttaactaccgtagtcaagcgnaaaaaaactttggctggaatactatatactggtggccaggaccctctaaatccttgaaaccactgg

SEQ ID NO: 4180 - DNA, 462 bp, Homo sapiens
  misc_feature 145, 332, 404, 423: n = A,T,C or G
ctgaacccctacaaaagaaatcgtggaaaagaaaaacataaactcacttgggcgggagagaaaaagcgtttgattaaaattcagaagacttgtgttttgattctgattcaaacactgagcctactcaagatgtgacgtgtatcanccccaagccatttgaaacttagttgttttcacatggaataccaccgcctgtgactgggaaagcaccagaatttggcttaaggtcaaaatgcaccaccccttgaaactagtaagaatcaacctatcttggaagacaacgtcacaggcagaagagaaatccccccaaagcatgaaaatgaccctagaangtcttgaaaggatattgagatgtacctgtggtaagataactgtgtcttgatgaactgcaccaggtgcaagcngatcccaaaggaaagacangaacctgactggattccaaaaaaggagcaaagggggagc

SEQ ID NO: 4181 - DNA, 235 bp, Homo sapiens
  misc_feature 214: n = A,T,C or G
cttcaatgaattggagagtgaagcatctgctttaatgggaaatttcaaatttcttcagcaatatcgtgagaataatctcagcagaagtcaataggagactcagaagcataagagtacctcctagaatttaaatataagaaaaacaaattgaagttaatagtcttattttctcattgtaaagttgcctgctcatcttactgtgtataaaattggnatccagttattcaaaaaaaaa

SEQ ID NO: 4182 - DNA, 122 bp, Homo sapiens
cctagatcttcggagcaaggactatgccttcctcaccttttcgaggtcagtctggcagaagtctggcagaagcctggcgcatggtaggccatcaataaataccagctgaataaaatcaaaaa

SEQ ID NO: 4183 - DNA, 108 bp, Homo sapiens
  misc_feature 29, 39, 50, 60, 68, 82, 92: n = A,T,C or G
atttttatgcttaagaccccttaaacaanctggagcatntgggggagttntacaaaactntggactgnctgtgcattcccanggcagatganatgtgcaccgactgga

SEQ ID NO: 4184 - DNA, 394 bp, Homo sapiens
  misc_feature 16, 47, 169, 187, 214, 220, 232, 244, 246, 266, 267, 273,276, 289, 299, 302, 304, 310, 318, 327, 334, 351, 372: n = A,T,C or G
gggattcaggggggcncatgaaagggccgggagggagggccttccangaacttaaatgggggccccaacttgaaccccaccctgcacccacaaggaactggatttttgccagcaaccctgaattggcccttaaaaagccggtttttcttttgggaagcctcctggatanggaagccccaagcccagnccaacacccttggattttggcccttgntgagancctaagagccanaaaaaacccttntnagccattaagtgggaccttnnggaccnttnagggacttttggnccttatggcnggnanggcccnttaatgancttgataantgggganaaactatggacaggggncattggggggaaaaggttggnaacttagttctggaaaaaagct

SEQ ID NO: 4185 - DNA, 549 bp, Homo sapiens
  misc_feature 21, 35, 48, 60, 63, 78, 121, 129, 132, 135, 141, 147, 157,160, 173, 181, 246, 253, 264, 347, 348, 366, 370, 371, 504,521, 529: n = A,T,C or G
gaagtctgggggagcgtaccntggcgttaagctcngaacttgaagaangggggtcttctngcnattgaaacttgggangtggcaagcgggcgccaattcaacaaggcttcaattgggaagncctggaanctnccnaagggntttaanggaagaattnatnccccaccttcaangccttccntaaggtaagccttggggaaacttaatagggtggccaccgccaggtatggcctggggctacttttntggtttnttattatggangaacaacagattctcacttattgtttgcccaagggcttgggtctcaatattccttgggggctcaaaagccaatcccaccttgnnttttgggccctcccaagnaagnngcttgggggatttaacagggttggttggaagcccacccattgcccaagccctccggaaattttcctcttactttgggcccttggaaagccaaggaaaaaaggcccccaaggaacaaaccaagaagaacccttnaaggcttaccttaaatngggatttnaaaagggaaaccccaaaaaa

SEQ ID NO: 4186 - DNA, 432 bp, Homo sapiens
  misc_feature 324: n = A,T,C or G
atcacctgggagccctattggcttgagccagaggaagcttctggttggattcactgacactcaaccccacttgactcaaccagtagccaagcacttggctgaagagacacagatgaataggggtattccaacctcacagcagatactactattattgccaatttacagctgaggaaactagggcccaggaaagtaaagaaacttgcaaagatcacacaaccaaacacttggcagaaccagaatggaaactgaggtcttcacttctggctgacccaaagatccatgttctagcatcacaacagtggttctccaaccgggtgctgngattctgcaaaggggggtgcctgtggggagccacataagcaggagggcttctatgccactcacccgattcaacaaggatcctgcacctttatccatttcacacctatc

SEQ ID NO: 4187 - DNA, 458 bp, Homo sapiens
  misc_feature 442: n = A,T,C or G
atgaggagcaactgagaagacactaggtaaaagatctttaaactaccacaaatgaaggaaagattacccaatgaaagactcttgatagctcagttttcattaatgcgacagtcactaggagaatatgcctagaaacttcagatgacatccccaaatgcgacgtgttctccagccaccagcagcagccgttcatgtaccatgatggcccactcaaagctccaccagcttgcggcaggaaacactgtgctgcactcaccaaacaggaaagagatttgggcccacaaggaactgaagaagcccaactttcatttactttagtatctatgcagaatctgactcaattgcatagattacatttaaatccttcagacggcaaattcaaaggtttgctgcttaccaaataataccggcattacaaaaattattctgggcccggtgcggnggctcatgcctgcctt

SEQ ID NO: 4188 - DNA, 419 bp, Homo sapiens
  misc_feature 317: n = A,T,C or G
atatttgaagatatggaaaaagatgatttttagaaaagatcataggtctttaaagagatgagttatggcagttttgcttcatgtttgggactgatggaaagtcaggagtggagaaggtttgggccgcagatgggattgatgagtctggctgttcaaacacagtccatacagactccacagaaggtcagtgagacaaaaggcagagggcctcagttactgctgtgggcaatactcaatcaaaagcaagagtggagagcacagcagacagtctaccacgatgcttggatctcactaccaacagaaatctacctcttccncagggagaagaaaatcgccatctctgaagccccaggcacctgctatgggcttgcttccaatctggggaagatatgaacactaaattgggagatttcagatgt

SEQ ID NO: 4189 - DNA, 220 bp, Homo sapiens
  misc_feature 16, 21, 43, 57, 95, 98, 114, 118, 126, 129, 134, 142, 143,149, 153, 154, 178, 201: n = A,T,C or G
ggatctcacttccaangcatnttcttgtgcctcatgcctcgcnggagatcacctcgncctccccatgtggcaaccctccacaatcgcagggtaanttnatggcacatttacatnaganacaatagngtnaggcnttatcgannaggccngccnnaacaaaacgaccttgaagcggganacccactcacatgcaccagtatnagctagggattaccaggcc

SEQ ID NO: 4190 - DNA, 184 bp, Homo sapiens
gtgatgagatgagaggacagctgttctcccctcactcaaggtagcactctgaggtgtccaggaggcgatccacaaatcatcccactgagtgtgcttacagccggtttctcccacctcagccctgctgcgaggaaggactaagaaaaacagcctgcatgggccgggcttggatttcaaaaaaaaa

SEQ ID NO: 4191 - DNA, 257 bp, Homo sapiens
  misc_feature 71: n = A,T,C or G
gcagtcctgaggggactcaccgagtactgtttgtgattgccatgtccatgatgccatcgcttagaagaagngccacttggcccacattcctgaatgcaagataaacacattaattcttctgtctactcacagcagtgctcaactccaactccagttgatcgtttgatcagattcttcatttgtttggttcctaagatatagacatgtctttctttctgtcttaaaaggcccttaaattccatggaaaaaaaaaaggc

SEQ ID NO: 4192 - DNA, 216 bp, Homo sapiens
tgatctacaaccatactgcttttaggaggcttgcctagtgggaccagattttgggaaacagcagtccacttcattgcaggaaacgtcagaagagggctatccagatgcagatctggaaagtctctgccagccaagtgggagttcccagtgaaagatacttctcagagaagcccggagttactcaactggaataaatgtctagctccataaaaaaaa

SEQ ID NO: 4193 - DNA, 192 bp, Homo sapiens
gatgaattattgaatgtgctggcatgatcattgctatacacgaaactcagaatggcctacatctgccaaatgcaatgtaagcaattatcagatgcaaaatgattattagtacttgacacaagtcttgaagcgaggattctagatcataaaatctagacaataaatccttttgtgtttgttttaagaaaaaaa

SEQ ID NO: 4194 - DNA, 450 bp, Homo sapiens
  misc_feature 74: n = A,T,C or G
gtggggtctttcacaacccatacctgccgggggacattgagcaatgaacttgacttgaggttttcaccagctgnaaacaccagagctgtctgccagaagcaaaggaaatgagatcacaagagaaaagtgacttggttcaatctacatggctaaatagaaaagaagctgggggaagaactccagtcttggtgccctcagtccattgccctttctggtgcaacatcaagtctaagttaaatcagtgggccccagagagcaagcccaattctgacacatttgggaagaatgatttctctaattatttccctcccttcagctttacaggatttcccaaaatccacagatgcataaagcagtatcatgttctgagcccggtaccatttccaaatgagaagttcaaggcagcacacagtgttgtggagttaagagatggaaagacagggtctttct

SEQ ID NO: 4195 - DNA, 169 bp, Homo sapiens
agttaacatgctttggcaactgacccggaggtgggagagcgagaaaagaagtgacaaaagcatcaagattcctcaagtagatacgtcctgaaatgagttggagtagactcagatgttgtgttcagaataaaagccaggagatttgactatctccataccagaaaaaaaa

SEQ ID NO: 4196 - DNA, 442 bp, Homo sapiens
  misc_feature 22, 40, 118, 208, 242, 251, 305, 357, 387, 392: n = A,T,C or G
aagaagtccccggggagccccnaatttccggaaggggaanaggggagggaccgaaagtccaaaaagctgcttttcatggtccccaattttggcatttctggtcaggtcactgggcttnaaatggaaaaaatgggtttttggaaaaaaaacccatcttttggatttttttgtaccccagtttcaaacaaatttctttggtggggaaaanggacccccagggaaaaaaaaatggaaaggggccntctatatanttaaaaatcttttattacaagggccaggtaatttgggtcccatacacttaaccnccaattaccccaaccaaggtaccaggggtttaaatcttttcaaaaaaatcantcaatttttaaaacccggcccaaaaaggancccanggaaaattaaaaatttttggaggtccaaatttatttttttcaaaaaaaaa

SEQ ID NO: 4197 - DNA, 360 bp, Homo sapiens
gctggtgcctctgccgagatcacccttttattccttatttggtagactcctactcatccttcaagactcagctttaagaaaactttatcttctttaagaaaacttccctggaacctgatatttcatgtcctgatgggttcaacatctttcctccgagctgcaacgtatagatctctagcatttgtccccatgtaactctctatttttattaattatatttataataaaatttttcttcatttttatccccttaactagactataaagttactgatttttcttttttgtctttgcatattcaatgcttagtatggtagcaaacttgttcaataagtattgtttaaataaatgaagagaagc

SEQ ID NO: 4198 - DNA, 152 bp, Homo sapiens
  misc_feature 21, 44, 54, 61, 75, 84, 86, 95, 111: n = A,T,C or G
tttttcctcccatttctttcnaaagagagatgttcgcggggggnctttattatnaaatttntctccccccaaagnccgaaaacngngggttgganattttatatttttccntaacccatttcctcttacctataatgcgccccataataatt

SEQ ID NO: 4199 - DNA, 145 bp, Homo sapiens
  misc_feature 121: n = A,T,C or G
ggtgtctccccatccactcatgcccttgctcattcaaccaggatttatgggaaccccagtcctgcttctctgacatgtcttcagtggagtccagcctacaatagagtacgagatttgacanttcttctcactttggcaaaaaaaa

SEQ ID NO: 4200 - DNA, 127 bp, Homo sapiens
  misc_feature 31, 33, 37, 47, 48, 61, 62, 76, 78, 97, 100: n = A,T,C or G
acagagattgtgctcacacaccatctcctcngngtanaccttctcgnngctagccagagannaattaacacctttntnatcccatgtcctccagcantgngtgtctgtgtgggtccctattaagaaa

SEQ ID NO: 4201 - DNA, 172 bp, Homo sapiens
  misc_feature 30, 41, 43, 53, 63, 107, 109, 118, 149: n = A,T,C or G
aaaggccttgaaaaaattggaaggggcttnttgggaacccnanttttttgagnaagaaaaccnctgaccttattggcctttggaaaaaaaatggaagccgaacctgngnaaaattccngaaaggggaaaaaaaaattggggcgaaaaantaaaactttggatttccccccca

SEQ ID NO: 4202 - DNA, 204 bp, Homo sapiens
  misc_feature 29, 39, 40, 74, 77, 81, 112, 114, 142, 153, 154, 166, 171,185: n = A,T,C or G
agctcgtggcgcagaggaaaatggacatnaggtagcggnnacaggctggcggactggtggcttttacacattgnttnacanaaccctgtccggggttttacacactcctttncnaaccgaaggacccctccattttctgggncccccgtgggnnaataccggaaanaaagnggggggctttttcntgaaccccaatggggtttg

SEQ ID NO: 4203 - DNA, 263 bp, Homo sapiens
  misc_feature 25, 27, 33, 60, 61, 62, 78, 86, 91, 96, 114, 161, 176, 190,195, 205, 211, 221, 225, 228: n = A,T,C or G
ctcactaaacggacagaacacaccntncaattnactggagccccgttggataaatacgcnnngattgttgggagctangtcatganccacnaatgntatttggtgttctgtgtnaatttgaaaaacgaaaattccttttgctggggggtcacccttccatntttacccaccttgtncggcccccaaacanttttnattaacccanttcaancctctttttncccngtngccccaacattgccaaaagaatgggggtttttggt

SEQ ID NO: 4204 - DNA, 185 bp, Homo sapiens
gtgaccatcccattagaagaagacagatgcagcagagaggccactaactgtccatgtcacaggatactcctcctacacccccctccctccctgaagtggtctgttctctacaatcatctcatcatccccatgttttaacttgttttcataatttttcagaaccctaatctcaatcacaaaaaaaa

SEQ ID NO: 4205 - DNA, 317 bp, Homo sapiens
  misc_feature 24, 48, 51, 65, 110, 160, 201, 226, 242: n = A,T,C or G
gaagcccactaactgaggcctagnggattctcttccttctggggtggnacnccgccttaaacccntaagtgccaaatggtggaagagggaaccctgggccctcaatttcntctcaaaatggtccccctcaacctggtggtggcctccctggctacacctngctattaaaagtcaagctggcatttggatccccaaagtctngctccttactggtatggatcttggncattggtaattaatgnggaagttaaacccaattattatggtaaaattaaataccaaaataaaaaatgggttttaaatttcttaaaaaaaaa

SEQ ID NO: 4206 - DNA, 447 bp, Homo sapiens
  misc_feature 390, 392, 397, 411, 416: n = A,T,C or G
ggataatagcccagcttttcagaagcattttgctctgcaatcaaatcaaatattcttaaacggacagggccaagtcaacccagcccaggcaaagaggatcccaaaagattgccaaaaacctggtgccagctctgacagatggacaaagcatctgctctcggctctgaagagagttttctcatccaagaccctcagtgaaagactgaactcatgattcttcagaagcttaaacgtgctctgtaatctcaagtattcaaaaccagaagaagtagccaactgctcaacatcttcatttcatcttgagttctcaccaggaagacttttctgatttgaatctagacaaagcaagacttatcttcaaatcagacccggcctgaacttgccctgaananggttnaaagccctgcaaanggctntacattttctgcaacttggcgtcatttcgta

SEQ ID NO: 4207 - DNA, 466 bp, Homo sapiens
  misc_feature 372, 416: n = A,T,C or G
gactgatgaaccttcctggcccaaaattatgccagggaaagcaaggaatggagctggctttcctagctctccaaggaatggaggagccatccctgtctagctcctccaggtgaacaggcaggtgcggccacaaacagcatgacgcagacggaagacacaaccacctctgcatttctcagaattttctttcctaacagtgaagcacgccattttttaaaccaccagacagtctcttagcccctacagtcctggctaaattgcctataatcctgagaaaagcagctgttccctgtccctggtcccctgccaaaggctctgagcctgacctcaaactcacactttagggtttttttatgtgactttggagttacnattcttaaatgggcctggagcccgaagtcatggctaatgctatnctacctccaaaaccaaagcatcccactgacctggacaaccttgatctgac

SEQ ID NO: 4208 - DNA, 166 bp, Homo sapiens
gtttgctgagaacctgccgtgtggcagcctgaggtgggaatgaggggttgacaagagagactcagcctccaccctcacagtcagatggaggagacagatctatgaaaggctggctgggtaccttctgtgacctagcacataaacaaaccaacaagcagaaaaaaaa

SEQ ID NO: 4209 - DNA, 473 bp, Homo sapiens
  misc_feature 50, 329, 364, 444: n = A,T,C or G
ggctcaagcgcagcaggaaggttgaagaatgctgtgaggagcacacgggngcagataatcgttggtgagcgttcttgccatgttgaactgatgtgtgtacaacttctctgctgaactgagaaaagcacattttggatgttgtcactttgctccttagtgcaacatgcacctccaagagagtctttcagagcttggagaagacccagtttctgatggatgagagatctcgccgtgcagccaccccttcccttcatcctcatcatcatccgtgttcacttccgtgatttctaactgctggaaggacagcagttgcagcacaggaggctttncaatgatgacggcccgggaaggcaagccctcccgnggttttctgctgctgggtctgtttcctggcaacaacagctttgtgccacgtttctcagtctcctccccaagagatcctgngtgcatttcatctgttactctacaggcca

SEQ ID NO: 4210 - DNA, 302 bp, Homo sapiens
atcctgcccctgagctttcatgagctgttgaaccatctggaattcacaggcctgtcatgagagacacgatgagaagtccttaaaggtagatcactgattcacaggggagcaggcggaggcaagggtgagtcagtgcttggaactcagtcatccagatttggctctggaaacttctgaagctgtagcctttggggatccctgactgcgagtacaggaagccaacgctatgtggtcttctggaaactcgttatctttttcactggtgctatctgggaaaaacagatgaaaacctgaaaaaaaaa

SEQ ID NO: 4211 - DNA, 411 bp, Homo sapiens
  misc_feature 92, 117, 125, 129, 131, 137, 155, 165, 171, 172, 173, 174,175, 176, 179, 183, 190, 191, 198, 199, 201, 203, 209, 210,220, 223, 226, 232, 269, 303, 304, 306, 312, 325, 338, 354,376, 390: n = A,T,C or G
ctgaaaatgagaacaagagagttcccttggaagctacattggagatgacagaactgcctttctgtccaaagcatggcttcctgaaatagaanccaccttcctgctctgtgccatgangagacacntaananacttcngttttgctgaatccaaantacacagagnccagannnnnncanttgntggcaannaaggggnntncntccctnnaagggggggnacnccncccaangtagacgacgacagaaaacatgagatagaagctgctntagtgcggataatgaaatctaaaaagaagatgcnncncaatgntctagtagcgggnggaacctcacccnttggaaggcgcaattntttaccaagtcccagttggttntttaagaaaccgtnttggaagggcttttttgggaa

SEQ ID NO: 4212 - DNA, 375 bp, Homo sapiens
  misc_feature 24, 33, 67, 86, 92, 97, 98, 99, 101, 102, 119, 120, 121,122, 125, 131, 134, 160, 184, 223, 259, 262, 274, 282, 300,308, 330, 343, 353: n = A,T,C or G
gggggccccccttttttttccccngaaatgcgnccccaggggggggggagtatttttggaaaccctntggcccaggggaaaaaaanggtccngggtnnngnnacctttggaattggccnnnngtntttcgnggnttaatttccccggggtttcccgaaanccaaaaaagaattggccaggccangccccccttgcaggtttgggaagaaaggcctttaaaatngggttttcttccccttaaaagcctcccaaggaagtngtngggccccttgcnttgaccanccccttgatttttcaagnccccccantggaattaccttggatgggttngggaccttgggtncccttcaagnaaccttgggggaaaaaggaaat

SEQ ID NO: 4213 - DNA, 461 bp, Homo sapiens
  misc_feature 396: n = A,T,C or G
tcaacacaagcaatgaaagtttatgaatttctctttttatgctttgaagacataatacttatggagacccaattcagaagtcatgcgattttcagcaggatgcagatggtgaggtgcaagggaaaaaggacattaactgctcacgatcacacgactggtaacagaaggatggggcttggacccagtgcagcaggaccccccagcatgcaccttccttccagccttccagagtgacaagcttccacattctggaaaatggctgcttccttggcttgaatgggtaagaatgaggttgggatgccagtgttcatggactctaaggttaagcaaggaagacaccaagaacttcctggtcacaagcacaaccctgactggatggtggatctcttttctagngccgtttccaccgtcagaagagttacccgattacctatgaattctgcagaacctactaccttctt

SEQ ID NO: 4214 - DNA, 230 bp, Homo sapiens
gtccaggaagggttccaagcatgggctcaacctagggtcaagttgaaacagactgttttccacctgataaccccaaagctgcagcttgactaagccgtcttagcccaagagggttccacctggcgtcccagaagaatggggacagtgtcctccacatctctgaaccctacccggaatccagtacagtgctttgcacacactggatctactaaacagactaaaagaaaata

SEQ ID NO: 4215 - DNA, 328 bp, Homo sapiens
  misc_feature 49, 51, 53, 65, 70, 76, 125, 126, 128, 129, 140, 163, 172,183, 185, 187, 208, 227, 228, 232, 236, 238, 243, 256, 264,284, 288, 302: n = A,T,C or G
accagaactgcatagcttctatctttgctaaaacaattggcctcctggntntntgacttaccatntcacngacatngccaatctactgcccgctcctgggaagatgggggaggactttgatcttnngnngcttactgtcngccaccaaattcctcggggaaanctttgcatnaccaccacctncnanaaagattgggcactaacaaangggtggctcaaaaacaacnnttcntggngntttgngggggtttcaccngtccaaangtaggccctttgctggaccngganaccacctaacattntttttgggggccattattaaaaaaaa

SEQ ID NO: 4216 - DNA, 386 bp, Homo sapiens
  misc_feature 23, 123, 135, 136, 140, 141, 249, 280, 351: n = A,T,C or G
acagatggaagcagaggccctancagattaaggatctgcttaacgtcttcaccaacagaatgagacttgcttctacattgcctctcaactggagaaaaactggaatgagtcttttgattttcncctataaatttnngggnngaatatcttttgagaatttgagtaaaaaatatccatgccatgtaaagtggaatcttgacaaacttgtactcatgaaccccgttatgaggttgtctattcaaccataanaaacatttctaaagtgactaaaaactaaccntattctaataggaagtcccctattctacctaagtctgttctgataaaaaaaacctggaaccatctttttcnaaacaattaaattttttttaaaccttaaaaaaaaa

SEQ ID NO: 4217 - DNA, 292 bp, Homo sapiens
  misc_feature 20, 42, 50, 61, 120, 141, 149, 157, 167, 226, 229, 252, 255,261, 268: n = A,T,C or G
tttgctgaaggactcgtaanagcccgactttgcgcacatagngggaacangcctgccctgngaattaccgggccacatggaagaagaaaattcattttgaccacccccgggatccaaganagataccaccctaaaaggttncttggaanacacttgntcccttttgntccttttctttccccttccctttttcttggcctccccttcctttttttttccctttttnttnccttttccttccccttccccccnaancccaanttttttntttgggctttaaaagcccaagggg

SEQ ID NO: 4218 - DNA, 331 bp, Homo sapiens
cacttttcctgaatttggtgtgtcgctttccaatccattccagcttcttttacacacctatgcctccacaaccagttcctggtgcagcctttggcagtgttggttttcgtcccattgacaagagtcatcgggctccaggcgccattacaggccttcgcttttcctgctcagcaccctccaggcgatccgcaggctgtgcagtggccactcttctgtcagccgtgtggcatctctcctcaaaggacagaacctgtgtcttttctgctctgtgttcccaattaggtgcttgagaaatatttttgaatgaatatttgcatgactcaaaaaaaaa

SEQ ID NO: 4219 - DNA, 332 bp, Homo sapiens
accaggaggagagaggcagcaggcacgaggcatgctgatcgccccacatcactgggcctgggactctcatgcaccactccactcacattctgctaatgagaacattctgcaggcctcagtctcctcgtttgtgaaatggaaccgctacatccagctttgcttgccctgtgggctgttgcaaggatccactgagaagtgattgccaaggtgcactgtgaacttacaaaacctaatgtaaaagaatcaaaccacattgctccaagttttgctaagatgaatctaccttaggatcatctagagaataaaacagttactagcaaccaagaaaaaaa

SEQ ID NO: 4220 - DNA, 396 bp, Homo sapiens
  misc_feature 20, 30, 37, 61, 62, 65, 77, 86, 87, 93, 97, 101, 103, 116,119, 136, 149, 150, 154, 194, 224, 227, 229, 232, 235, 249,276, 287, 308, 322, 358: n = A,T,C or G
ccccctggggaggcctagcntgctctttgngcaattngcttgctttagcccaaacaaccannacngttgtcttcctngtccaaatnnaccatnaaangcgngnccttgggagtacnctnggaggatatatgacctngaaaacactggannaagngaactcaagggactttcaaagtcaacaggatctaatggcnaaacaaaatgtagcctgtagattattggcncgngncgncanggcccaggcctgtnttcctcctgtccgaggagggaaagccngcgggatcctngtccctcccctggaaaaaagncattgtttgggacncaagcttggggccggtcccccccttcttatgccagntgggtaaaaagggaagccacaatcaagggaccttgaaa

SEQ ID NO: 4221 - DNA, 439 bp, Homo sapiens
  misc_feature 33, 55, 61, 63, 71, 77, 80, 90, 109, 130, 137, 186, 224,230, 256, 277, 290, 313, 314, 320, 372, 418: n = A,T,C or G
tagctaccttgcgttaaggctaccaacttggtnggagcactaaactgcacttctncagggnantggtggancaaaanaantggggagtgntatgtcaaggcgctaatgnggacccaaggcccaaggcccntcggcantcccccccgtggaactttggcccggtattaccgccccaagaatgggccntgaaagttaacctggaaagaaatcccaaaattaagggnggaatntgccctggccccacctttaactgganggacattccaccacaaaaaanaagggggtaaaanggggccgggcccttggcccttanntggagnggacattatcttggggaagaagtccttttccttgggctcatcctggggcttnaaaaaggcacccccacttggagcaatttttggggaaaccccacttncttggccgggcaaaagaaaaa

SEQ ID NO: 4222 - DNA, 284 bp, Homo sapiens
  misc_feature 27, 59, 70, 71, 101, 102, 103, 110, 120, 135, 150, 152, 162,164, 168, 173, 186, 187, 216, 258: n = A,T,C or G
tgctgaccttacaagaacagccttccngcctgatccgtatcctttcccagctggactgngaccatgctanngacgcacccactctccttcttctacaaaannntgcttcnggaacttgantggagcctgaaggcncatgccaaactgctnanctctaatggntncctnagccnttgctctgacagnngagctgacgggaacattgctctctaattnaatcccttcattcgaaccatactattttttcgtttttaaggnccttttctgctggatgtttacctgcc

SEQ ID NO: 4223 - DNA, 128 bp, Homo sapiens
  misc_feature 94: n = A,T,C or G
gaaaacttaggaaaccccatccgtctgccttttaaaggtctttagggcagccgccacgtttaccacctgatttttggggttcacagtctgatgngtcatacttttgactattaactggattgagctcc

SEQ ID NO: 4224 - DNA, 392 bp, Homo sapiens
  misc_feature 357, 358, 374: n = A,T,C or G
gagctgtccaggtgggaacttcaagaggctcattccaccctggaggatggaaaatggtccttcatgcctccatcaagaggtctgggatccctgcacgttcgagtctctgaccttgcgccaatcttcctgggcccaaagtttggagggtgcaggccaccctcccctgagaacaggctcgcccgatgtgcttggtggggaggcctgagatttggaacaaactggctcttctgtggagacttttgtccactcagctcctccctttgagtttcagattcccagccctgctgcactccagaaaaagaaacagaaatttggaagcaaataccgagaagggcccctttaaaaggagaattccannacccccattcccaagnttttgggaaatggtcctc

SEQ ID NO: 4225 - DNA, 316 bp, Homo sapiens
  misc_feature 22, 54, 57, 67, 68, 82, 88, 89, 95, 98, 105, 107, 108, 112,114, 116, 137, 138, 149, 164, 205, 218, 238, 269, 272, 283,289: n = A,T,C or G
taagtttacataaagactttcnaacggccaacatggaaattggaaaagttagancanatttaccaannctggggaaaatgcngaactnnggggcntcnttccaantnnggcngntnctaacccaaactaaacccacnntaagggcacanctggcttgcatgggnaactgagacccttcccgggaccccccacccacccttaagcnagacattctactnctgggctttatggaggctgnggccatgtccacttcatgggctactggactntgngccttcagtangaaagnggagtgcccaaaacttgggcttgagag

SEQ ID NO: 4226 - DNA, 338 bp, Homo sapiens
  misc_feature 30, 43, 56, 62, 82, 89, 99, 102, 105, 114, 124, 135, 136,141, 152, 156, 180, 201, 206, 220, 226, 231, 232, 236, 241,245, 246, 253, 263, 268, 269, 284, 293: n = A,T,C or G
cctgggaaccccgtggaactggccaacaantggaaaaaatctngggattgataatnggaccncggggggccccttaaccganaaaaaantggaatttanccnccntttggcacnggaactcttnttcatttttgnnttttntttgataaccnaatngcctggtttaccccttttgtcttnaactgggtaaccccccccccncaatnaaccttcctttgcncacttngaatnnttcntttgntccnngaaaatngggttcgggnttagnnaaataaaagggcggngcttgcccntatgaaaagggaaaaaaatttgggagaatatttcttaaaaaaaaa

SEQ ID NO: 4227 - DNA, 544 bp, Homo sapiens
  misc_feature 19, 28, 36, 53, 67, 86, 94, 101, 110, 113, 115, 120, 128,130, 137, 139, 168, 169, 195, 198, 210, 219, 221, 249, 277,360, 377, 494, 507, 519: n = A,T,C or G
ggaagcgacccttgtgttnaagctaccnggccttangggacctcacccccggnttcaaaaggaggtnggggaattggccatccaanggcatttnggccccnggatggggnccngnaccancaacaccntnaactggnanggggaaagggatcttataaaggaggggcnngtttcccagggggattcaatttagcnaancaataacccaanaccaccaancnaggaaaacccgaagccattggactcaancttccttggcccacttgcaaatttactnaatgaccttcttgcccctttcaagaacgttgggaaaaaaaagcccaagccagtgccctttgcaagtaacctgcttggcttaangggtcttgggaactttncttgacaaaataaaccttgccaaaggtctttttgcttacaagggggaagggcttcaaaacttgggatttcaagaaaaggcccaccccaccttggtatgacttggaaacacaattggngggactggggtantcaaatggccanataaatatttgtacccctctacgga

SEQ ID NO: 4228 - DNA, 660 bp, Homo sapiens
  misc_feature 29, 35, 52, 60, 85, 132, 140, 159, 545, 552, 567, 580, 612,644: n = A,T,C or G
cccaagcctttggtttttccaagcccttnaattcnaaaaatgggaagtccgnttctgggnttcgaaacggccttcttgaacaaangtggtggtaccttaacgttgtcaaggcccattcctttccttggcaangcctttgncttgggaggtcacccttgncttgagcttgggccccaaccacagttagcaaacaagtggatgcttgatgtgtggacttgcttgccaagggaagccttgctcacatggacccgtgttgggaagaaaaagttctttcccttgagggaccaatcttgggaagtgggaccgccgttgcactaccccttctcttggaatacacccttccccacgaggccctcttgggaagcatccttgtaagaagccaggccccttacccaagaagacccttgaagcccaagaagaatgccgcttggggttgggtgaagccttggggggacgaaatgcaagaagccctaaggtcttctcttcaagaaaagaacccgggatttttgccattgtttgggccaaggcttggtctttggaacttncttggancttcaaagtgggatnccaccttggcttnggggctttccaaaagtgcaaggggatttacangggtggtgaagcccaacttgggacccccgggnctttaaggcaagaata

SEQ ID NO: 4229 - DNA, 415 bp, Homo sapiens
  misc_feature 161, 172, 174, 181, 191, 194, 203, 233, 243, 251, 254, 259,263, 266, 270, 274, 279, 280, 292, 296, 299, 303, 364: n = A,T,C or G
aagaggcagacaagaactagaatagctggtttattattcaaagtccaaaaagaaaagctattgcctccagatggggccaaatccacttctgaaatgggtgctcagaatccccccaatgaacccgagaaacaccatctccgctgggagcaactctgccctcnggggcactggngntggctgnaaacaggctnggncggcactgntgggaaaaggtgggcccttgttgcattttnagggaatggnctgggganctngttcncatnctnggantggncgccnngacatgagcccnccanccncacnattattgattaatctggatccaaatgccaatcggccaagcttggagaaactcttgctttanaagaaacaatgaacttttgatttcaatgaggacacgtggatttcaaactaa

SEQ ID NO: 4230 - DNA, 206 bp, Homo sapiens
  misc_feature 34, 35, 53, 72, 80, 92, 102, 111, 130, 132, 145, 158, 169,173, 186: n = A,T,C or G
attaggaaaccgggaaccgacactgagctgctgnntaatgaatggcctactgngcactacgatagaatgaanacagcccnctgtttgctaanaggaatcttnctggtgggnactattacttatttaggantnggcttctttaaanccagaggtgcatnagatgtcatanactngcaaacacctggntaatcatctgtttgtgcccc

SEQ ID NO: 4231 - DNA, 300 bp, Homo sapiens
  misc_feature 96, 191, 235, 285: n = A,T,C or G
atcttcttatcgccttgacaaaacccaggaagcggtccatctcttactcaccgtgcagcgcggcacagctagcacaagagcacagcaacagcccanctgctctgcgagccggtggagcatgaatgaccaataccaaacctggaccaggacagctacccttctatctacctctgggctaccatcaacacggngactttggccatcggaggggaaagaaaataatagcgatatgggnttaccttgacaatatttctcatttagatcaataaactgacaaatctgtanttttttaaaaaaaaa

SEQ ID NO: 4232 - DNA, 102 bp, Homo sapiens
  misc_feature 21, 42, 43, 46, 55, 69, 70, 77: n = A,T,C or G
taaaaaatggcagcccccctngtgggatgaatgttacgcctnnaanaaccttttnccgaaaagattttnnttaaacncccctgtttttttgacccaaaaaaa

SEQ ID NO: 4233 - DNA, 423 bp, Homo sapiens
  misc_feature 354, 391, 398, 400, 401: n = A,T,C or G
ttcctccctcaagtggtggagtctatttccccacactttgaatccagactggatttgtggattggactcgtgccttggtttagccaacagaatatggcagaaatgactgtggtcaagttccaagtataggccttgcacaattctcctcccttggattcctggccttgccatcaggtgaccaagtttaggccaaactgatgagggatgacaacaatgtgccatggacctcttaaatcatgcagtctccagcagatcacagatgaatgagtgacaccagctgagatcagcaagacccagacacaaatcaagcaaaccactcaaccaaccccacagactcacgaaaaaaggagtgancattggtttaagtcacttaggtttgggatgggtcatnacaaagnannttactggtcccccttcaagggg

SEQ ID NO: 4234 - DNA, 303 bp, Homo sapiens
  misc_feature 32, 49, 54, 57, 62, 65, 71, 86, 92, 109, 117, 120, 139, 148,156, 167, 180, 190, 208, 229, 231, 233, 234: n = A,T,C or G
tggctgacctctagctcctggactcgagcatnccttcacctgctgctancccangcnttgtnatnacaggnctgctgacggtgatnttgagncagccacaattcttacnagtaagancanaaatcatgacaacctttgntctctgttnattcgccnatctgtactcnattgggatcatgngataagaccncggcgaatacatgaccanactccctacttgtcttttctncntnnaaacctctgtaggaatacaaacaattttagaaatgagaatatttagttatggaaaaagtgaaaaaaaaa

SEQ ID NO: 4235 - DNA, 456 bp, Homo sapiens
  misc_feature 380, 393, 439: n = A,T,C or G
aaaagatgtggctgtttctgaattgctcccctccaaggacgcctctgccccctctccgcctggctggctttgcagaggttgaagggaagacctgggaagacacatgcaaatgaaccccgccgggctgctgggcaacgagggtgctcaagatgcaaactgagctgcagcaataaagtcaaaaggaggagaaagaatgaaacggtggttttcatctttatcccttgtcgttaggcatggttcttctcaatctattgttagacttgattgtgtttccgtatctctacttgcctttcagacgcaatgctcttcactgcttaaaatgattagtatattccagcagcaatttctacagcaaaaagattcccccatggggggaattntttgggtcaaaanaatgaaatcgggagtttggggacattcctgttcataaaggtacatntccatgggaaaaaaaaa

SEQ ID NO: 4236 - DNA, 203 bp, Homo sapiens
tctgggtggcccagtaaacatgaggaagagatgcctgtaccttctggatgctcccgctgaaaggcttcaggacacccgagttcttcttcacatcatcataattggggactccgccaatgaaaatgtctgtgttgcacttaatctgtgtgaagcctccctgccaaaagattaaaaacaaagcattgtatgactttaaaaaaaaa

SEQ ID NO: 4237 - DNA, 435 bp, Homo sapiens
  misc_feature 387, 409: n = A,T,C or G
ggcacctgagatacaatgattcacctccttgatttttgaaaattgaatcaacttttgaaaagcaattttggttttataaagtcatagtttataaagcttcagaagtcattcccaggggatgcttgaggatgaatcatcaaagaactgatacctgaatcagagagtgatcattcatggggcttagaagtgtcagacaaataggctcatgatttggctttacataaacgggccaggaagagatggttgaggagtctatagtcatggtactgggaaggtcaagggaggaatatctcctctccatgcaggttttgccttttgtcaacaacagagacccaagatctgatggacacaataactcagtggttcctaggatagcctaaaaggttnccaacctggaattaaatctaanaaaattaaatctttaacctgacctta

SEQ ID NO: 4238 - DNA, 454 bp, Homo sapiens
  misc_feature 276, 298, 301, 307, 311, 312, 327, 334, 407: n = A,T,C or G
gatgagatggatatcttgtccagcccgctgccactggaccatttctgcaggtaagggggtcaaacccacagccactggaccctcttctctgtagggcccatctatcaccccatcttgcagtgtggagcctcgagttctccaaatgtccagatcgcagctgtcactgagcagttgcatctgttacacagtaaaggagtcctagagaagtgctgccaaggggaactcataaaaaagccgctgctggagactcagatgtgccctgctgagcgaggcagnctccttctacttacccggctgnaangagccncaanncaacccgcgggggangttgaanaataagttgaatatggttgacaccgggggcatcatactggttaaccatttttttggggttaactgcagatganaaaattcctgtattaactcctggatcctctagggcattttgccctgt

SEQ ID NO: 4239 - DNA, 181 bp, Homo sapiens
  misc_feature 16, 20, 27, 45, 48, 64, 73, 99, 100, 101, 112, 123, 142,155, 159: n = A,T,C or G
gctttcatgatttggnatanctcatanaggaaaccagttcccaantgncacatgaggcaaggcnccactgggngggacaccggaacctttaccttgttnnnaaatggggtgncaaatggcttnccaaaaagaaagaaccttngagaaagccgggnttgntaagtccccttttggggggggc

SEQ ID NO: 4240 - DNA, 434 bp, Homo sapiens
  misc_feature 25, 33, 56, 64, 68, 86, 87, 97, 111, 115, 118, 184, 252,395, 413: n = A,T,C or G
cccgggccctttttttttggaaggngggccttnacccatggagaacacaccgcggnggggactncccncgtttttggcttgggggnngggggacccnggaaattggttttnggantantaatgaaaatttaccattccccagagggaatttttccttgaaagaaaggaataaaggaaaaaaccntatggggtggaaaatttttttgaaaaaaaattcccattccaataccgtttgaaaggtcttcaaaaaangctttgcttcccaagttttcacttggatacccccgcttgtttctggaaattttggatgggaaaccatggtttttctttatggacaaggtttggaaagccttaatggccttaaatcctggtattggttgggaccaccctttggnaaatttaaaaaataccgncccccatggaggaaaaaaaac

SEQ ID NO: 4241 - DNA, 131 bp, Homo sapiens
cagagacaagcgatggagatgcaggttacccaggtcttccatgacaaaatggttactctgttacatttaagagaggtgcttctggaattcacaatatacagttcaataaagaatatttgcagtaaaaaaaa

SEQ ID NO: 4242 - DNA, 252 bp, Homo sapiens
gtttatgtccagcacaagtggaaaatcaccaacagctttgacctctgaacagacactgccggaagtcatggaagtgaactggggtgaagaattggttttttccatctcactcaagtgtggcaggacagttgctctgtagcaccggcggccaggaagtgagggggaagaggcaggaaatgtgtattggcttctacacataaacttcgtatctataaagaatgagactattttgtttaaacgtttaaaaaaaaa

SEQ ID NO: 4243 - DNA, 470 bp, Homo sapiens
  misc_feature 22, 31, 41, 55, 71, 79, 88, 104, 107, 119, 148, 157, 177,182, 188, 192, 194, 215, 226, 354, 360, 363, 370, 371, 372,376, 379, 400, 402, 404, 407, 442, 445: n = A,T,C or G
ctctggggagctacctcctgcnttaattcanaaactggagnatcaccaaaaaagngggcaagggaatcacnaggaacanggaagaggnagagaacggaaaaaanggnacgggaatgggnaaagggaaagggaaagggaaagggaaggnaaaaggaangggtaagggaagggggaaanccatnctggcnggcngnaacctcacaaatcccaagacnagaccgttccngctcaatttttgggattgggtatcaattccaagaaatttttcccacaaccatactttaaaattaagcctcttaattttttttaaataaaaaaccattttcttaaacatttgtggcttattttttaaanccattnaangatccannncggnccncccccggggggccccaatttnangnttngggactttaaccccagggcttgggaaacttttggnttnaaaaaaggggggggggggggacctt

SEQ ID NO: 4244 - DNA, 294 bp, Homo sapiens
  misc_feature 37, 38, 40, 59, 84, 90, 99, 113, 122, 129, 156, 162, 170,174, 184, 187, 202, 225, 234, 235, 246, 263: n = A,T,C or G
cttggaaaatacctttgggcccaccccaggccggaanncnttgccggggcccaatattncctgggttctggaatgggcttaaantggggnttttgccangggacttaccaaantcccaaaancctttgnctttttttttaaaaaaagggcccaacnggggtnttccaaangtgnaaggggcctnttnccgaaaatgaacctnttgaaaggcccaatttttggganagggccccnnttcccgggttnggggagggcccctgganccccccaagtttttgggcttttaaaaaaaaa

SEQ ID NO: 4245 - DNA, 253 bp, Homo sapiens
attaagtgtggagctgtcctggagatggagatgtcaacggaggatgattctgagacaactggccccttgcagtgcagataagctccattagggggccttctagtcatggtggcataatcctggattgtgattaatgacaattttgtaacaaaatattgccatcagaactttccagtttatgaatacgaggtaaattttggaaagacaatcttttctagtacaaaataaaagtaagcctttcgaacacaaaaaa

SEQ ID NO: 4246 - DNA, 101 bp, Homo sapiens
  misc_feature 25, 32, 33, 34, 39, 42, 49, 61, 70, 84: n = A,T,C or G
ctctccaagctccctgaactcctgnatctccnnntaggntangctgccnccaaagtacttntcatgctcnataattatctcccnttcatcaaattcacttt

SEQ ID NO: 4247 - DNA, 196 bp, Homo sapiens
  misc_feature 35, 42, 43, 113, 114, 118, 149, 150, 152: n = A,T,C or G
taccaactcactgctccaccattaccccctgcctnaataggnngatcctgtggtaattgctctatgcctcccaacctgtgtcccaatttctcatacttctcaatctataaaanncctncaacttctttatccactaaccacgctctgtnnanccatgctcctccataaattttaacatgaccataatattatttaa

SEQ ID NO: 4248 - DNA, 105 bp, Homo sapiens
  misc_feature 43, 64, 81: n = A,T,C or G
tggatttttgatacaaaaaaatcttgggaaggaaaaaatgggnctagaccggctttctttctgngcgtttggccgagtccncggaattatccaagagcaatccgg

SEQ ID NO: 4249 - DNA, 372 bp, Homo sapiens
  misc_feature 30, 37, 47, 55, 66, 73, 80, 86, 87, 98, 102, 111, 122, 138,156, 168, 170, 193, 206, 210, 211, 257, 271, 316, 319, 347: n = A,T,C or G
agttttttccccccctttctaacttaaccnctttcancgactagccngcccaacntggggaaaccnggcgtcnacttganaaacannaattacctggngcgnggggggatnttccttgaagnccagcttcttggggangctgaggcaaaagaattnctttgaacctgngnaggcaaaaggttgcaccacgccnagaattgggccantggnnctccaagcctgggcgacaaagagcaaaactccgccccataaatttnccaaaccctttttnccctggcaaaaataagggggaacctttttttcccccattgaaaanggnatgggaagtttccccttaaaaagcattnggaaaaaggctgggttttttttaaa

SEQ ID NO: 4250 - DNA, 102 bp, Homo sapiens
  misc_feature 37, 74, 84: n = A,T,C or G
gtgggacctcaaggcaataagagtcttcttccacctnctggacttgaagctccaccacataacttccattaggncaatgggatnttggttgaacatgggaca

SEQ ID NO: 4251 - DNA, 304 bp, Homo sapiens
  misc_feature 33, 67, 87, 111, 117, 120, 137, 145, 165, 236, 238, 278: n = A,T,C or G
ataccctcattatggcatcatgctgaagtgcanactggctctcctgtgaagatttatcatgtgtggnggccactttgaattggaggngctgtagtcttcaacattccctantcaagngtntccctgctgggcctgtnaatgtcantccagttttttcacggctgngcgcacagattaaaaacagcaggagagcttgggagtatgactacaataccagtaaggacacttgtcttcgnangcaccgctcaagtgattcttggaatgcaggaccctgctgntttctaatatttacacacaactggaa

SEQ ID NO: 4252 - DNA, 243 bp, Homo sapiens
  misc_feature 16, 23, 27, 49, 72, 84, 95, 104, 118, 134, 140, 141, 146,154, 157, 163, 167, 174, 203, 204, 209, 215, 224: n = A,T,C or G
catgactcaccagatnctgtggncccnctatccaggggtgcactcagcncatgaggacacctgtgattctgnccctatgagttnatccccaaccngtcaggaanacccattccttaangcccttgcctgccaancctgtnnggganactgattngancgatanactnacaattnttttgtgtggcccactccacatatcaatnnaactntttctntactgcagnaaaccaaaaagacaagagc

SEQ ID NO: 4253 - DNA, 150 bp, Homo sapiens
  misc_feature 21, 36, 50, 52, 54, 65, 79, 107, 122, 131: n = A,T,C or G
gccaaattaattgccctccanagaggctctgctgtntattcccccactancngngcagaaattgncacgaccctcctgntttttaaaacctcatccaggagtgactncccatcctccctctntcattcctncctttgaacatacctgatg

SEQ ID NO: 4254 - DNA, 190 bp, Homo sapiens
  misc_feature 25, 40, 63, 80, 88, 104, 139, 142, 145, 159, 166: n = A,T,C or G
accagaagtatccacagtggagatngcccccagcaagaantttatcgcttgcttcccctgaangtggtgtcgggtcctgnccaagctntgttagattgaagatngtggacctggtgctgctgggcaaacaaggccatcnatnatnactggtacccgccnggcaaantgacagttgatttcttgcttggcc

SEQ ID NO: 4255 - DNA, 263 bp, Homo sapiens
  misc_feature 52, 71, 88, 89, 91, 97, 105, 108, 114, 127, 139, 144, 156,158, 171, 179, 184, 206, 219, 228, 232: n = A,T,C or G
actccttttgagcaagttcagtctggtgtaagtccaagctgaattggcctanatacccttttaaatggcgnagccctcgaagaattgnnancccgancgccattnaantggacncttatggggccanatctgttttggnttttnacccttgaaagnanaatactcattaanccaccttnttttnttttaccccagatcttttacantgaaaaaaaatgngtggggggnggtncattgttttcaaagagccacttggacaaaat

SEQ ID NO: 4256 - DNA, 127 bp, Homo sapiens
gaatgaaagatgaagaagatttttggaaaatctgggaatatggaatgcagaatgatgaagtcaagaggatgattcaccggattaagatgctatacttataaacaaacctttaagggaaaccaaaaaa

SEQ ID NO: 4257 - DNA, 129 bp, Homo sapiens
  misc_feature 17, 29, 30, 37, 41, 42, 45, 46, 54, 82: n = A,T,C or G
ttcttaaatttatgatnaacgtgaaaggnnatcaaancaanngcnnggcaaagngggaaaataagccccctttaactttttntggattatttaaaggtctactggggcaaatgtgatgaaaattaaaaa

SEQ ID NO: 4258 - DNA, 152 bp, Homo sapiens
  misc_feature 32, 67, 71, 73, 75, 76, 118, 129: n = A,T,C or G
aggtgagctggtcacctccttagacgtggcangcaggaagcaagcagtccttaccacagcgatattngctnangnnactcatgaggagggctcagttacgaagaatctttgttttgcntctcactcaantgtggcaggacagttgctctgta

SEQ ID NO: 4259 - DNA, 610 bp, Homo sapiens
  misc_feature 18, 39, 43, 100, 133, 136, 146, 151, 153, 154, 173, 187,189, 191, 193, 198, 213, 222, 226, 230, 232, 260, 282, 294,309, 320, 326, 328, 333, 339, 357, 376, 378, 381, 390, 402,407, 420, 424, 442, 445, 446, 453, 459, 462, 468, 471: n = A,T,C or G
  misc_feature 476, 478, 482, 491, 515, 538, 539, 542, 558, 559, 570, 575,590: n = A,T,C or G
tggctcgtttccattgangacgtgtccgcatggtacctngtangggatgggcctgtcggaacgaatattgttccctcgacgaagaataggccatcccagnagcttgcgtgggtacctcagggaccgcgaaaanganaaacggttgnggaantnntgcttcgggcgaaggatcnccatctattttgcncnantntttgngcagtcgaaagaggnggaaaatangatntccngnccttagcctccaccagatggtgggcacntgtgggggcgtcgcacattaantccttcttgctngggacacaagccacntaggagtgggnggcgcncngttgntactgnaattggggcatcctcctngggttgcccgaaagatagngnttntctgtcacngcgagactcccntcgcncaataaccaagcntccnttggtaggtaacccccanagnntataganggttcntcngacctnaangggcncnttgnaaggcaccngctgggaccttccttttctttggntttaaactttgttaaacttggcnngtncccgggggttttaagnnggacccccccnattgnaacttttacaatggngcggggtcccttttaacttt

SEQ ID NO: 4260 - DNA, 383 bp, Homo sapiens
gcttttgatgtaaaagaatgctgaggatcctgcagcacttcctgctcacaactggagagtcatccaataattcaccaggagggagtgaagcagctcaaaacagcagccaaaggaaaaagcctaacaagatgcaactattcttactaaaaatgaagacattctcatactcttccttaaatgagaagacacaagtccagagagtctttgtatccatctgggcactatgtcaattactcctcgaattcagccaaggtcctttctgaattgacttttaaccaaatactaatttgtaaagttatcctccaacaaaacttgtataaaacagtgaaagaaagaagaagagaagaagataacagataatacaaacaaaacaagcaaaaaaa

SEQ ID NO: 4261 - DNA, 408 bp, Homo sapiens
  misc_feature 334: n = A,T,C or G
ataggccctggcaggcaggcaagacggatagatgggtgcagacgcaatgctagaggtgttaagcaattggaccaagggcaacttggcccctgacaatgtctcacttgcttctcagcctgacccaggggagccacatctgccttctgatgtgcacgtcgcaggaattaccaagaaacactgtgttctgctgtggcacctgtgtgtgtcctggaggacaagtcccagctctggggcagctctggttttccagaaaggaaagacagtatcctctggatgttgatggtgtttccagcctgcatctcctgttggaacataagaagcttgcaagccgtcnggggccgtggtccaccacccttgtccgaccgtggtccctggcatttggcacaagtgcccagcacgtacctgtca

SEQ ID NO: 4262 - DNA, 335 bp, Homo sapiens
  misc_feature 295: n = A,T,C or G
gtgtgcctcatacagaggtgctggtccatgcctcagccttgccacgctgtcctctactcaggtcccctgtcctgtgccattgtacatcttgtctcctgccccagagctccatgaagagtgtcgtcttgctctttgcaaaacatctgcctctttctttgtctggaggaggagctgccgggaagggaagctgccaggaaagaagagcaactcaagttggcctacttcctgttttgaaacccagggacttgcttgcaatcaaggatgggttgtagaggcttgaggaagatagttcccngcaccccatgaataaagggctggttgtgggaaaaaaaaga

SEQ ID NO: 4263 - DNA, 211 bp, Homo sapiens
gctggagccccaaagtgtcatgctgtaaggaagtccagcctagtgcacatggcaggaccacttggagaagccctgaaattacatgatgagagacacccgagctatttcagccccaaccactatctgattgcaaccccatgggagatcccaagccagaatcacctctagccacagtgaaagataataaactgccattgtatcaagaaaaaaa

SEQ ID NO: 4264 - DNA, 302 bp, Homo sapiens
tggggtctttcaaccaaagggcccaggaaggagatggctacaccagaaaaccctgagttcacagaaggcccaggaaggagatggctacaccagaaaaccctgagttcacagaaggcccaggaaggagatggctacaccagaaaaccctgagttcgcagaagcaatctggctaacacagaatatttgcatagacccgtttgcctatgactgacctagctttgggtcactcacatgcaaatctgtggggccccatggggaagggagaagccctttgctgggaatgctgggggtgggggagttga

SEQ ID NO: 4265 - DNA, 220 bp, Homo sapiens
gaatactcctcatgaagtctatccagtcacatctagttaagaccagcagcactctcctgtccaaatggatgacccatgttacgactaaggaacagaagaccaaataacaaactgctcctcagatccattatggaggccttcttggctcaattcctgaatatgatatatccttataattttgttttctctccaaaaaagaatatgctggcaatgaaaaaaa

SEQ ID NO: 4266 - DNA, 215 bp, Homo sapiens
  misc_feature 42, 69, 75, 87, 103, 115, 116, 120, 121, 134, 136, 200: n = A,T,C or G
gaagctgaggataagttccatcagggatgcactgggtgaagngcactcacatagctgccacatacttgngatggnttttggagaggnccattttacagcactnacccatcaccanncagnngccctcagtcccncnatccgtaaagaattgaattatgcaggcaaccacaagaatgagcttggaagcatattcaccccanaaggacctgacagaa

SEQ ID NO: 4267 - DNA, 171 bp, Homo sapiens
gactttttaaacgtttcagtacaatttacctttctgctactggtactggtaaagaggaaaggtctgcaaatcaaataacagtaaacaagatatcgatgttacttaagcaaacacgttactctcaagtatttgagaacggtgtggataaaaccaattccttttaaaaaaaaa

SEQ ID NO: 4268 - DNA, 226 bp, Homo sapiens
ggtgatgctggcatgcctagctctggaagtggtgaagcctggatttatacagcactctctgcaagtaccacatacaccaataaaaagagggttctttaggaaatgaggtgtgacgcaggccagcttcgccaagactcttggaccaagaaataaggatttaaatatgaaatactaaaatttaacacatgactgaaacaaaataaatggtgtactactgaaaaaaaaa

SEQ ID NO: 4269 - DNA, 178 bp, Homo sapiens
  misc_feature 23, 31, 50, 56, 67, 69, 73, 83, 86, 92, 93, 97, 128, 145,150: n = A,T,C or G
gtcatcactatttgaactaccgnggaggaanagagacgtgctacaagagncttggngaactgcttcncntaanaaggtaccanttnaatgannccancactaagatgatcgcttgagctgaggagtgngagaccaacctgggcancacanaggagatccctgtcattacaaaaaataa

SEQ ID NO: 4270 - DNA, 176 bp, Homo sapiens
  misc_feature 31: n = A,T,C or G
ctaacattatatcttgggatttccaaatcangttcaaagagattcctgaagttcttctctacagctgcataatatatgtagatataccatatgttattcgtgtgctctcctctgtatggacagttagtttttttctaatattttgttttaataaaaatgctgcagtgaaaaaaaaa

SEQ ID NO: 4271 - DNA, 440 bp, Homo sapiens
  misc_feature 32, 82, 92, 186, 207, 319, 323, 355, 389, 395, 396, 410, 411: n = A,T,C or G
tagcttgtagcacatgcaagggggaaaaacanacttgggagcaccccagctttggaaacaaggtgggacccggggactggcnaaccaaaaanggaaactggacttcaaacccgggtccttcttggaaccacttccccctggcaggggaaaaatggacttcaagccaccaatggaaaggaaccaggntttcaaacaacttccctaatnggaattttcaattcccccccaaacccaaaatcccacaaaacaattcttggggtttcccttaaatggccccctaaccctggcccaaaaatcaattcctttaaaaaaaaccccntaancccctccttggaaatttctttgggtgggaagnggggggggatccttgggggaaaaatggggaattncccggnncccttcccttcaanntttttaatttggggccttttggccaaaat

SEQ ID NO: 4272 - DNA, 265 bp, Homo sapiens
  misc_feature 49, 50, 70, 128, 129, 155, 164, 191, 194, 197, 202, 205,223, 225, 228, 242, 244: n = A,T,C or G
gcacatgctttccttacactacgtcattgccaggttggctgatggactnntgaatgtactgctttgtganaggattgttctgactatggacccagcctaagcccactcttatagggtgatgtgcacanntcacatcctctaaagccactgaagcntgatccatnccacatgtacattagggaggtaggggnganaancactngcnttggagaagtttaacccntnccntaactttgtttttnangggggggggaatttaccccca

SEQ ID NO: 4273 - DNA, 462 bp, Homo sapiens
  misc_feature 303: n = A,T,C or G
caatagaaaacttatacagtactttctatggtcagttgtgatcataaaaagagagtaagaagaaaaacaactctgaaagacaagatttggtttctctctttcattgtacacataaaataagacttgaccatctggaaaaaggaagcctgagaatgaatatataagaagaggacataaaatggtggaaagagaaagcatggttttagcagccaaattctgaaataaggctaaacctacatggaggcatttcttcagcttgaaggaaggaatttaacccaaagacattggaaaatgacttgacanagtcacacaggaaattgttgtaggaattagaactagaaatctggtctcctgatgatcatttctaggaatggctactaaaaaatcaaaggaaaaagatttcaatagaactagaaatctgggctcctgatgatcatttctaggaatggctactaaaaaaaa

SEQ ID NO: 4274 - DNA, 130 bp, Homo sapiens
  misc_feature 30, 60, 64, 65, 82, 104, 107, 110: n = A,T,C or G
cggccacaacacagggcctgggggaagctnctcaaacacacggaaccccgccaggaagcncatnncagccttctcatgcacncgagacacccttctgctcatancgngcngggcaagggaccaaaagtaa

SEQ ID NO: 4275 - DNA, 105 bp, Homo sapiens
  misc_feature 50, 52, 54, 78, 87: n = A,T,C or G
gaggaatacagcacagaacaggggttcccagcccttttggccacagaccngnancgggcccagggcacgcaaggagcngggccagcncagcaggagaggggcggc

SEQ ID NO: 4276 - DNA, 185 bp, Homo sapiens
gaagaaaaggagctctcttgaaaaaaggaaatgtcttggaatttacccatctggatgctgcttgaaaataaattgtcctccaaagaacagaaatacagtatgttttctctcagttcactggcttatgaatgactttttgttgttgtggttgttttgttaatacacactataatgtcaaaaaaaaa

SEQ ID NO: 4277 - DNA, 396 bp, Homo sapiens
  misc_feature 31: n = A,T,C or G
gtaagttcgaggatcgggaagaccacgtccnttagttggagcaaataaacagcacgaggatcctgagcagccagaacttcaccctcaccaagaaggagctgctgagcacagagctgctgctcctggaggccttcagctggaacctctgcctgcccacgcctgcccacttcctggactactacctcttggcctccgtcagccagaaggaccaccactgccacacctggcccaccacctgcccccgcaagaccaaagagtgcctcaaggagtatgccattacttcctagaggtcaccctgcaaggtgacagctgggacccgatggcaggacctcccaccccttccccaccacccaggggtcggggtcaggcggctctaaaaggcatgtccatccagat

SEQ ID NO: 4278 - DNA, 178 bp, Homo sapiens
  misc_feature 29, 65, 68, 69, 73, 78, 80, 84, 85, 86, 89, 91, 152, 161,162: n = A,T,C or G
ttttcttcattttacaacccaaacttctncaatctgttgaaaaagttctggaggtgatggtggtnccnnttgngcaanantagnnnggntntgaccagccttgaacgtgcacactcttttgctgtttacacctggaagaaatactcataacnccacctctnntatttacccccaatct

SEQ ID NO: 4279 - DNA, 268 bp, Homo sapiens
  misc_feature 26, 31, 50, 51, 58, 70, 72, 74, 82, 83, 91, 104, 114, 115,121, 126, 136, 140, 142, 152, 156, 208, 216, 251: n = A,T,C or G
atggagtcgcattctgccgcctttgntgganttttatgcgaccctgaccnngcttcanatacacaacagncntncttagccnncccagatnagaatgaaagggnaggcaaagannaggacnagaangccacaaggncaantngactagcctncctnatagtacttcaatccacaccaaaccttgacttaccgcgccccccatgcctanaaaactgncttttaaaaagaacattagtggtcaccacgttggnaaagtattaataaataa

SEQ ID NO: 4280 - DNA, 369 bp, Homo sapiens
  misc_feature 235, 279, 280, 285: n = A,T,C or G
gtctgcctggatgtttgaaatgagatgtgatttctgctaacttctgtcaccaccaacatacacctctgaataggaggaataagttttacctttggaaaaaagccctgggcaattcaagtgaagcaacaacttggtgattttcttcttgggcattttatcacctttcaagttacatccaaggagcatctatttggggatatgtttgattgtctcaaaaaaatacaacagcgaaacnaaactcacaaatgtctgttacgtgaaggaagtgtgaatgaaatnnaaccntgggggggagagatttcctagcttcgtttttcagcctggattgattaactctaataaattcaggaaggtgatttcaaaaaaaaa

SEQ ID NO: 4281 - DNA, 151 bp, Homo sapiens
  misc_feature 23, 37, 51, 85, 100, 109, 111, 123, 124, 129, 136: n = A,T,C or G
tgaggtttaaagctcctcatagncctggacatttagngcccacatattctntgtctggcgttttgttttacccccctgcgcaaangaaataattaccttncactgaaangnccacaccttctnnctctnatttctnaccccccataatcct

SEQ ID NO: 4282 - DNA, 122 bp, Homo sapiens
  misc_feature 23, 26, 33, 49: n = A,T,C or G
aatttctggtttttcctggcaanccnggacagngcatcgacccataggnctgggaaaggcaggaataatgatgcgccagagagaattctggattcgggagaatcacgagacttaacaaatat

SEQ ID NO: 4283 - DNA, 494 bp, Homo sapiens
  misc_feature 462: n = A,T,C or G
acagatctgctcatcctgcgacattgtggacagtgctgaatggcttccagaacattcctcttatgtctactggttaaactttgaagcatctgaaccatttgggagagcagggacccccatgaacaggagatactggaggtgtctgaggccacttcatgccctttctcaagagtggcctgcaggtctttcagccactggccactgaagtccagctcctgccagccatggatttgggcactgggctccagtgttgagaaagttcttgacttccagcgcttgttttcctagtggacaataggagtcagagacagagagggagagtgaagatgcagaagacatatcctttccattgtgacccagataagaatgtagccggtgagcttgcttcctgtcactcatttcccagctatttgttgtaagtccaagttgtgcatattctttctgttaggttcttatgtttgncttaagctcacccatcttttcttcttccctca

SEQ ID NO: 4284 - DNA, 245 bp, Homo sapiens
  misc_feature 16: n = A,T,C or G
atatctggaggacggnctttcaatacaaatcctggattggattaatgaggctgacggcttcaccaaagaaccagcctatgtccattctgatgacagctcctgtgcctgtgctccaagtttacaggggaagaaaaactgcagagcagagaaggagaactcgtggctttctcttcgttggcagagttatgaataggaaaactacttcaatgcatgtaaaataaaactagctttcattataaaaaaaa

SEQ ID NO: 4285 - DNA, 316 bp, Homo sapiens
  misc_feature 20, 30: n = A,T,C or G
tacactaaactggaaagganaatggccttnactggacccctcttgggtcttaaaacacttggaagaagggtaaaggggggaaccttcttgcttgcacccggccccttgggaaggggaatttttttggaatccccttaaaattaaagaaagaagggtggaagggaagggaaagcccctgcccctttccttccttgggcccttggaaatggtgctttcttggaagaaggccaagtcaaaagcccttgggaacttggtgggccaagcccggcttttgtggacccattaaaaaggaaaaaccaagccccaaaagaaaaga

SEQ ID NO: 4286 - DNA, 246 bp, Homo sapiens
ggctcatggcttctcatgtcaccacgttatcgcccatgtggatggggtttgtgcctgcctttgaaagtgatcccgaaccgaactccagaggcacctccttttcatgactcctcacctcccagccgcccctgatgcccattttctggtggtaccatgaagcctcccacatctgaattaccttgccctgtatatttgcacatttgcacatatgttaacataaacttcaagctcctccaaaccaaaaaa

SEQ ID NO: 4287 - DNA, 490 bp, Homo sapiens
ctggtgccgcagacgttgtggagcagaggcaagccatcctgacctcagagacaaggaaaggtaacgcatgaagcctgctgttctacaccactaaggtttggcaagctttgttccccaaggtgcacatttccttcctcctcaaccgagggctcaatgtggcttccttcctgagcgcctctgagacaggctcctgtcactgcagcatttcccaggctgcttgccctgcacgtctggctgtcactcagccccatctcctggagaacaggccacagggagggctgcgtgagcagcctgccaagtctccctgcttctttcccaatgagaagaacacacgtttctgattccctttgcaaatgaaagaggacccctataatttaagtcctacggtcaacaagctcatccagacattaaaagctctcatgccggctggctgcgtcctcttacacaccatgtgaccatgggcaaggcactgccatgtcttaacctgtgt

SEQ ID NO: 4288 - DNA, 364 bp, Homo sapiens
  misc_feature 30, 41, 42, 43, 83, 85, 123, 143, 148, 153, 158, 159, 160,162, 163, 167, 173, 197, 206, 211, 221, 224, 273, 281, 285,296, 298, 306, 311, 318, 322: n = A,T,C or G
tctgctcaggcaccccccgttgcctggganaggatccctcnnncagtgcgcatgggaggaaaagaagaggcgccaagagtgangngcgaggatggactgcggccaccagctggttcacagctncgcgagtgggatttttttgnccagnttggnacgannngnngttngtggtnctgagagatgctgaggggtttggncccctcctnctgcncgggccccangangggatcatgccccatgccccaaagtgaacacaggaacttcagcttcctncgctacancccntcattctactntnctcatcangaagnggggggnatcnaatctagtcatttgaatcaacaagcatcttcttaaaaaaaaa

SEQ ID NO: 4289 - DNA, 351 bp, Homo sapiens
  misc_feature 18, 33, 45, 49, 82, 126, 131, 153, 154, 176, 178, 187, 199,210, 218, 222, 261, 269, 282, 285, 294, 309, 327, 328, 329: n = A,T,C or G
tggctcggagcgccattnaaataactgtcttanaaagaattactncccngccctgccactcatcgcagtactgttcgtaatncattaagcatgtctgccgacagtggaagccatcacaaacggcgntgagngaacctgaattcgccagctggnntcagcaccttgtcgccttgcgnantaatatttngcccatggctgnaaacgggggcngaagaagntgtnccatattggccacgttttaaatcaaaacctggtgaaacntcacccanggattggcctgantangaaaaacantatttcttcaataanaccctttaggtgaaaatnnnaccaggttttttcatcgattac

SEQ ID NO: 4290 - DNA, 227 bp, Homo sapiens
  misc_feature 20, 22, 36, 41, 49, 53, 76, 90, 96, 97, 99, 113, 126, 145,148, 150, 154, 169, 207, 208: n = A,T,C or G
atggaagccatcacaaacangnatgatgaacctgantctgncagcggcntcancaccttgtcgccttgcgtataanattttgcccatggngaaaanngnggcgaagaattcgnccatattggccangtttaaatcaaaacctggnganantcanccagggattggcctnagactataaacatatatctcaataaacccttccacggnnaataggccagggtttttca

SEQ ID NO: 4291 - DNA, 135 bp, Homo sapiens
  misc_feature 19, 30, 42, 47, 48, 49, 52, 63, 65, 82, 89, 108, 118: n = A,T,C or G
ctgacgtaattcattgaancattttgccgncaatggaagccntcagnnnacngcatgatgaancngaatttgtcagcggcantcagccnccttgtccgcttgcgtatnatatttgccnatggcgaaaacgggggc

SEQ ID NO: 4292 - DNA, 108 bp, Homo sapiens
  misc_feature 24, 42, 82: n = A,T,C or G
agagcactgtgggctttccacacnaagctctggccagcatgnagcatgggggaaagggatactcacacttttcattccattnggcttgcaggtgtcaggattggcacc

SEQ ID NO: 4293 - DNA, 266 bp, Homo sapiens
  misc_feature 26, 28, 40, 65, 69, 77, 82, 92, 138, 139, 142, 143, 147,148, 174, 183, 187, 188, 199, 202, 215, 217, 235: n = A,T,C or G
ccgttgcctgggaaagggatccctcntncagtgcgcatgngaggaaaagaagagcgcccaaagtnaggngcaggatngactncggccaccanctggttcacagctgcgcagtggatttttttgaccaggttggacgannggnntatnnggtactgagagagctgaggggttggncccatcctnctgnnccgggccccanganagggatcatgccncntgccccaaagtgatcacngaacttagcttcttccgttcaacccctcatt

SEQ ID NO: 4294 - DNA, 369 bp, Homo sapiens
  misc_feature 21, 23, 29, 33, 36, 58, 66, 87, 88, 109, 120, 173, 183, 194,197, 209, 215, 217, 221, 226, 228, 247, 263, 268, 286, 292,306, 322, 326, 339, 351: n = A,T,C or G
gaggatgccagtgctactgangngctagntcangangcaaagggagagctggagtctntgatggcncaagtcctgaactagcctatnnggtgagttctaattgtacatngaagcgcacantacgactttctagtgtctctgccattcggcgaaaacaaataacagagcgtacnagcgtagggntctaatgcaanacnacggaactatangcacanancatncacananttgcgtcaaagagagcgtngcgagagaacctcacncctancttccttctggccccaanacaacntggtacccttcaantttgcatttaggcccngaanaatcccatttatngaagccttcacnaggtggccctggccacct

SEQ ID NO: 4295 - DNA, 281 bp, Homo sapiens
  misc_feature 25, 35, 36, 44, 53, 65, 84, 88, 98, 108, 114, 187, 203, 242,248, 251, 255: n = A,T,C or G
ccgcctgagaggagcaatagccatnagccaggaannaatgtgangtaggggcngggggcaccacntagctacacagatgaccgngtgntatctttctnagtcacagtntcaggnacgaggatgtgcgctgctagggaccttgattatggagcttgattggcgttggggaccgcgatcctttcgtggntccgggcccacccaangtactggttaatcaacgttcccaaatgccaccgaggtgnggactntanattnaaccttccaggtttttctttcgattc

SEQ ID NO: 4296 - DNA, 110 bp, Homo sapiens
  misc_feature 16, 20, 54, 62, 68, 88, 93: n = A,T,C or G
caaacaaaaccatgcngtcnaaaggaagagttgtcgataccgcccaagagaagnactgaagnaacgtnaagaatagcactttgaagcnaaaangccctgccccgccttaa

SEQ ID NO: 4297 - DNA, 111 bp, Homo sapiens
  misc_feature 32, 51, 58, 60, 70, 75, 78, 96: n = A,T,C or G
ctcttcttcctgaggacccaggccctgaaggngcaaccactattagatttngaccgcntngaacaaaagnttccnttngagcccgttcagagaacntcttgggcaagctgg

SEQ ID NO: 4298 - DNA, 314 bp, Homo sapiens
  misc_feature 25, 28, 66, 77, 92, 98, 111, 118, 126, 131, 133, 135, 148,155, 166, 167, 170, 177, 183, 187, 204, 205, 208, 221, 231,233, 241, 251, 282, 298: n = A,T,C or G
ctgggcaatattcaccaacctgacnttnctggaactggcttgctggccccaacaaggggaaagaanaatggactggnaaacacttcatcccncaaaanggaggcctctggnccgcttngaagcctngcccngncnaagcttatttttnaaaagtnggccggaaggnntancggtaantccccntttnaggtttcccccaattcnnaangaaacccccaacnggattggaangnaattttgncttggccggngaactttgctgaaattacaaagaagcttggnttgggccctggctttngcttgggaatcaaaga

SEQ ID NO: 4299 - DNA, 216 bp, Homo sapiens
ggcttctacccatcaagcagccttcttcctttggatctcacaagcttccaacaacaccatctgtggtttggctcaaacccttctgcctgtgctgccatcctgttcctacaacactgccttcagctaagaaaattgacaaagaaattgcacggcggttgaatcaagaagaaaaggcctgagatgtaaaacggattcctcggcatgaagcaaactccg

SEQ ID NO: 4300 - DNA, 136 bp, Homo sapiens
  misc_feature 20, 39, 65, 71, 74, 83, 92, 112: n = A,T,C or G
tttcaagcctgcgtttaagncccaagactgaatctggcncaattgcttttagctttttaccctgngcaagnaanttactcatnaagccaccntctgttatttacctcccaantctttcacaaaggaaaaaactgtt

SEQ ID NO: 4301 - DNA, 258 bp, Homo sapiens
  misc_feature 54, 81, 106, 109, 110, 117, 118, 127, 131, 140, 141, 145,146, 150, 153, 159, 188, 197, 198, 201, 202, 205, 212, 222,233: n = A,T,C or G
acagatccatcccactgccgagctctggctaccctttccacgacaggattgtanccgtgaaatgtttggatatatgaaaantacatccagaggatttttttgatcnatnnataacannccataatgntganttttttgannaatnncatncantacgtngaaggctttaaaatgcttgctccagtttnactgatccnngcnnttnataaagnagatggcccnagactgatatngctgatccctcattggctgcatctg

SEQ ID NO: 4302 - DNA, 158 bp, Homo sapiens
  misc_feature 22, 61, 85, 87, 88, 116, 133: n = A,T,C or G
gtctgtgtcccgaagcttggcngatgagcgaacttagcctggaaggtgcagccactttcanatttgaccacatggaacaaacatnannaagacccacccgtactcttgccagttgncacgtatcttgaggganagctgtagtctctgtgtacacaatg

SEQ ID NO: 4303 - DNA, 349 bp, Homo sapiens
  misc_feature 35, 168, 241, 291, 298, 305, 318: n = A,T,C or G
gatatgcttttcattgttattacagcatgcattanaaaaagcaactgttttgaagtgttcatgtggtcacatggtatctcacccccaagcccacccaagataagccactcacattgcaagcaaaaggagaaacagcctacaaaggaagagcgtgttgcttgcttccanacaaaatacatgctgcatcctcaaggcatttgtgtgtcataggctgttgactggtgagccagctggttccatntgggagagacagtgctgcaaaaaaggaacttttggggggtttttgggggnaaaacanaacttgntttttgatactgngaccctggcctgtgtacctggaggagtccct

SEQ ID NO: 4304 - DNA, 120 bp, Homo sapiens
  misc_feature 44, 46, 48, 51, 72, 82, 91: n = A,T,C or G
gcccgggaacgtaacttacacgctgagtgcttgctgggtgctgngnanganggcttgcccccacacttgccntgtggactcntcttcactnctcactgagaaaaggcaaaatataatgga

SEQ ID NO: 4305 - DNA, 309 bp, Homo sapiens
  misc_feature 16, 19, 23, 34, 70, 77, 91, 113, 127, 130, 156, 160, 165,210, 235, 254, 260, 264, 270, 284, 286, 287: n = A,T,C or G
atggccgaaagaagcncanagcnagggaagatgntggaaaattctatgctgctggctttgaaaaatgganggagaangcttccccaatcangccttgcccggcggccctctanaacctggagaaaancangcccattagtttctaccccaggcccnccanaaaangaccccaaaattgcccacacccattaagtttaaccccccgtaaanaaccttttcttgggactttttgccntttccaaaaaactttccanccaagnttgnggtttncctttacccccttnanntttggggataaatttaattttc

SEQ ID NO: 4306 - DNA, 184 bp, Homo sapiens
  misc_feature 40, 42, 55, 71, 79, 108, 113, 116, 122, 124, 132, 140, 142,159, 161, 164: n = A,T,C or G
gccttaaccttgttaaccccttatttagtccgaactgctncnccagaataccctnttcatctgaacattcnactaccangaacaggcatcaagatctcccactaattntggtnggnaggttntnaaccattnccccattntnaaccaagaaaaggagancnacnagcaagtacccatagactgg

SEQ ID NO: 4307 - DNA, 196 bp, Homo sapiens
  misc_feature 47, 59, 82, 85, 89, 97, 102, 108, 110, 119, 122, 130, 132,133, 134, 141, 154, 162, 166: n = A,T,C or G
gaaacctctccttgttgaggatgcagacagatcccatctccacttgngcgagctcttgnctacccgtttccacggtaggatntgnactncctgcganaccanactttnanaggcccggnganatcttaangnnnccttatncctctttgggcanagcctaantaanacttacactctttggaagaaaaagatagtc

SEQ ID NO: 4308 - DNA, 133 bp, Homo sapiens
ccaaaatctcatccactcctctgcgtccgtccacatgtcctgggaagccttccctgatcacctcagagcagcttccgaatggctccagagcaataaaggatttcaacatttgggatgatggctttcaggattg

SEQ ID NO: 4309 - DNA, 251 bp, Homo sapiens
cttcaggaggctccaagaccagcaggcatataagcaaaacggaacatagacactggaagcaactttcctgtgttagtaagccagcagcatcctcacaccatgcgactttacaacaactgctgccctatcctcagagcctctgcccggcatggactggggcactcagaatggtatcccttgatataatgcatacgatggcactgtctaccacctcctcatgcctaaacatttctcagttttcagatttagag

SEQ ID NO: 4310 - DNA, 191 bp, Homo sapiens
  misc_feature 24, 47, 52, 63, 65, 90, 92, 100, 114, 118, 120, 123, 132,134, 151, 154, 167: n = A,T,C or G
gatcttgctatgtatgcccagganggacttgaactcctggcctccanacgangcttccacctnanacttccaaggtgctggcattaaagncntgagccancacgcctggctgcnaatntncanataagagangncctgatctctacctaancgnaagcgggcaccangactctccagctgctgggcactgt

SEQ ID NO: 4311 - DNA, 127 bp, Homo sapiens
  misc_feature 29, 45, 50, 56, 72, 73, 74, 83, 102: n = A,T,C or G
gctcacttggactcactgactatcaagcnctgtcgacctgcatgnacacntcgcanatggtacagtccttannnaaggcgcgnactggagtttgttccttangaggaacggatgtgttcggagctta

SEQ ID NO: 4312 - DNA, 107 bp, Homo sapiens
  misc_feature 20, 24, 28, 49, 65: n = A,T,C or G
tgatttgagtgctccggctngagnctgnttaatactacaatactggaantgtgctatgatgctcnttgacctgattgattttgtctgaagaagcgggtgctgtgtga

SEQ ID NO: 4313 - DNA, 205 bp, Homo sapiens
ctccccaggcaagccagatcgcgctcctgcctcagatgtccgtagacctgagagatttggagatctaagaaagctggaagatgaaaggatctttcctaggcaattggctacagaaataaaggggacaaagataaaactaatctgatgaaagcagtctggaccagaggaaggatctcaataaataacttatttagtcaaaaaaaaa

SEQ ID NO: 4314 - DNA, 293 bp, Homo sapiens
  misc_feature 162, 183, 192, 207, 263: n = A,T,C or G
gtggtctcacagctacatgtgttccgtgcttgcagcagggtgctccagggaatgtgacatggtgatgactgctgtttctaattactgccctatcaggaggcagaggaaggagccagcctggtgggccactgaggaaacgctgacgttcctgattgtcgggtngctggtgctggtagggcctgnctgatgccngcctggtcacttggnagtgaggacttgcctttccccaaacaaactcaacatctgaatgattgacaagggcncagtaatcaataaatccttatttcctgtta

SEQ ID NO: 4315 - DNA, 101 bp, Homo sapiens
  misc_feature 21, 30, 31, 44, 45, 54, 57, 63, 67, 84: n = A,T,C or G
ggactccttcttctttttttntaaagggtnntttttttttttanntcgcctttnttntccttnaganctgtttgaacccctttnaatacctctgtgcacat

SEQ ID NO: 4316 - DNA, 343 bp, Homo sapiens
  misc_feature 24, 28, 40, 42, 52, 54, 55, 62, 64, 66, 67, 74, 75, 80, 92,95, 107, 110, 115, 154, 162, 169, 187, 188, 202, 205, 225,227, 233, 246, 263, 268, 270, 293: n = A,T,C or G
acaccccaatcaaagctgagggcncttnctaatgcctgcntnactggtgagngnnagggctntntnnagatcanntcatnaacaggcactgntgntaccactgtggntgncctgncttggatcattcactctggaggatgccagctgtgatggnccacaagngaggctntggacgggaaccttttannaaccccacaagggnctnggggcttaaattaatgaggntngaaatngatctttcgactnaggccaagcttttggtngactngnaaccagggggcaggaacttggcngggaaccttaagaaaggaaccttgggccgaaactaaccaagtttaagcct

SEQ ID NO: 4317 - DNA, 375 bp, Homo sapiens
  misc_feature 21, 76, 113, 124, 199, 215, 252, 279, 295, 308, 310, 315: n = A,T,C or G
gctgcagtaaacattcttgantaccttgccctcattggcttctggctttttgttgagctcgtgtcagaagtgctgnctacaaggatagtgggagcagaagcagaggtgggggnggaaggaccanaccccaaggaagatgccagcagagactgggctactgcccacacttacctgtgctatatcaagcaggaaaagctgnaggggggaagttcttntggacatcttaccctgggcttcctgctgaagccgccntcatttactgagtcaagcacggccagngtaagctgcaggtcangagacctggcttnancctgnctttgtcacctacccctctatgtgaccttgaataaatcacattttttttttaaaaaaaaa

SEQ ID NO: 4318 - DNA, 102 bp, Homo sapiens
  misc_feature 18, 34, 35, 38, 49, 64, 83: n = A,T,C or G
agcaatgtcacagacggnttaagtgcaagctganntgntcaattctttngctttttaccctggnaagaaatactcataagccnccttctgttatttaccccc

SEQ ID NO: 4319 - DNA, 109 bp, Homo sapiens
  misc_feature 29, 39, 51, 53, 68, 70, 87, 91: n = A,T,C or G
ctggtttccacccttttagagcaagtttnagccctggtntaagtgcaagcntnaatgaggccaacttntnttgcttttttacacctntganaggaaaattacatttata

SEQ ID NO: 4320 - DNA, 108 bp, Homo sapiens
  misc_feature 48, 77, 86: n = A,T,C or G
tcagcctggttaagtccaagctgaatttggtcaattctttttgctttntacccctggaaagaaattacttccataangccaccctnttgttatttaaacccccccaat

SEQ ID NO: 4321 - DNA, 465 bp, Homo sapiens
  misc_feature 34, 38, 43, 45, 46, 50, 56, 59, 60, 61, 62, 67, 70, 71, 75,76, 79, 86, 106, 127, 141, 145, 146, 151, 158, 159, 167,191, 195, 203, 205, 244, 248, 255, 268, 289, 290, 304, 306,315, 384, 412, 414, 418, 429: n = A,T,C or G
gtaacatttcctatcaaagactcgggtttcttgngaangaatncnntcantactgnttnnnncctgntgnngctnnttnattatantaccctgtgactatctaagnttagctcctgtcacacagaanttagtgcttcgagntggnngctancgatccnntcttactntctagcatttattggggttcttanatgngcatggtnancattcaccttctaaaactgttgggctgcttgactttgcnattnatggctncttggtccttttntagcaggtcacatagggctgnncgatcaaggtgttntnctccaggcncggtgatgtttgcttttccatgggccaaagtttccaccgctttcatgtcccatcttgtccaccaacatncgctttggggtaaggaatatcaccggtntnaggncattaaggggncccccctgttgtgggaaaccccaaaaaacccaacca

SEQ ID NO: 4322 - DNA, 273 bp, Homo sapiens
  misc_feature 46, 47, 49, 51, 53, 54, 129, 131, 179, 239, 241, 249: n = A,T,C or G
atgaagaatgaccactgcctatagtgcagctatgacagtgataccnntntntnnaaggtgttcaccgatgatggaagcattatgagaatacaacatttctgggcctcgaattcataatactgactttgntntaaagaattgctgtagggcatacacgagcgatataccaccatttaganttccttttttccaccctgtacttcttgtatcttacaattttttgggatgggcgggccagngngggccaanttcaatttggggcttacccggggc

SEQ ID NO: 4323 - DNA, 239 bp, Homo sapiens
  misc_feature 52, 78, 83, 119, 144, 153, 166, 171, 192, 193, 194, 197,202, 208: n = A,T,C or G
gaaggaaaaaatctccccaagatgaatccagttctcccttgacttcaataanggaattggctggcatcttaagcttgnacttnccagccttcaaagctgtgagaaaataaatgctggtnattgcctcatcttcctatggcgggncgggggggncataattcatgcnttttnttcgggttgcttttcaggcannnggnggggntgcgcntaaacaaaatctctacccacatcaaaaaaaa

SEQ ID NO: 4324 - DNA, 349 bp, Homo sapiens
agtttcttagcaggcattttggaggaaaagatttggatcagaaattcagaaattacctgggctcacaaatatatgcccctccagcaccatcctgcattctgcttccaagatacatgagctttctgaagagctggtgagaatgctgaaacttcctggccttggtttcccatctggtaaaatgaggaagaccaaagcttaactctcacaaggaatatgcagatgaggaaaccgaagctcttggggtaacacgacttgtgaaactgcatgctactcctcagtggcagggtggggactctggacagaggaactggcaagggcttctagacctttgcgggcataaactggcagg

SEQ ID NO: 4325 - DNA, 457 bp, Homo sapiens
  misc_feature 47, 49, 56, 57, 63, 66, 77, 90, 115, 150, 176, 181, 190,191, 207, 218, 229, 258, 259, 293, 298, 344, 422, 428, 433: n = A,T,C or G
gcacttgaactgattactttccacataaccgacgctagggacaccgnangacatanntgctgnctntgaggagctcncaaatttgctctncagagaggcctctcaccccaccttncatagctttgtctccactgagtcaaaagctgttanatcatctgtttgtcccctgagtggtncttanaatgaacanncaaatggatggcttgngggtggggtgngccatgcctgnaaagaagctcccaaggaagcaatttccannacttttccctctgcagcttcccaccaagctatgngaaantatcaatgatttgactgcaacgtccctgacagctgctgcccatctncacgtggggcccttcaataactggaaacttggtcttaaattttttaacttggaaaatacaaacaatgacgacgaccgngaatgngaagntatttctgggaattctcttttatt

SEQ ID NO: 4326 - DNA, 198 bp, Homo sapiens
  misc_feature 24, 46, 57, 64, 81, 84, 104, 116, 120, 122, 124, 125, 133,139, 170: n = A,T,C or G
tgagctaggataataactcccgtnacatcaccattccataaccttnacatcgactgnactatangaatggcctaggcagcnggntcacttggaggtcacatganctcaagaacctngatncngnnccaccttnggccgnaacccccctttttttaattaccaaattaccnaaaaattttgggcatttgggggggggcc

SEQ ID NO: 4327 - DNA, 307 bp, Homo sapiens
  misc_feature 154, 264: n = A,T,C or G
agacttggaactgagaatgcaacacccatccatccttggaagccttctccagagacaagcgctcgttctccctgggaactgtgtaggagatgcagcagggagcctagcccagcctgtgcccgtcctagtagcctgcacctgtcaacgcaaggtntacggatcaaacggaggggactttctgatggagccatcctggcagggccactgtgtaagaaagaagtcacatacttgcaaaatgagggtagtggccaagcgcactccccnaatcctctgaaataacaaaattattcatgaactgaaaaaaaaa

SEQ ID NO: 4328 - DNA, 634 bp, Homo sapiens
  misc_feature 22, 60, 71, 84, 178, 217, 263, 286, 294, 296, 298, 302, 305,315, 319, 321, 325, 328, 337, 344, 346, 348, 356, 364, 374,375, 379, 384, 386, 388, 389, 391, 393, 408, 410, 419, 431,437, 454, 455, 461, 486, 503, 518, 535, 538, 565: n = A,T,C or G
  misc_feature 571, 581, 584, 587, 588, 597, 606, 609: n = A,T,C or G
cctcgagaactcacctactagngcacaccatgtcacgttggtggcgctaccgatatgcancgcatgagtgnattgtgtcgcatnacaagaggagatccaaacatatacgcttgccaagttatggatacatgggcgttcgagaccgccgaaaacatatgcttgctatatgcgcgcatangattaacgtgtagcgacacagcacatacgagcatatagncgccagtcgcttcgtcacagacacacgtacttggacgacattgggnatgggctcgccttgagaacgccnaccgtaancntnttgnggncacgcttggncttnangggnccncttggggantttgccngntngcccgcgngggaaggnaaaaaggggnntaancccancncnncngngcggtgttgtgctcnancacataganccaccttaaaanccttgngactacaaatatatgcnnttgtanggagacactgagagaaggaatttgnggctatagtagacaaanatacacacattaccntttggtcccctcagganggngatcggttttttttcttttaaaacaantttttnggggattggnctnaanngggcaattnaaaaaacgnccnccacctcccaaggggcaaaaaaaaa

SEQ ID NO: 4329 - DNA, 256 bp, Homo sapiens
  misc_feature 20, 38, 51, 52, 80, 88, 102, 107, 117, 122, 140, 142, 144,145, 152, 185, 203, 239: n = A,T,C or G
caaatctgaggttcctgatncagaaagaagttggaagnttggtgggcattnnaggccaccacccttgaaagtaaattctncagcaggngaattcattcgatnacacnaagccatttntccanacatctgacggggcgggnantnncccaaantttttttttaacaaaaagtgatgtgaatgccangaaaatcctggcctttgncttggcccagtccacacaggccagaaacagagcagnacccagcaccccactgg

SEQ ID NO: 4330 - DNA, 111 bp, Homo sapiens
  misc_feature 16, 17, 43, 53, 60, 62, 71, 84: n = A,T,C or G
ggggggtctgaggaannactgaacttaaggttcatggccaaanaactgtgggnggatttngngggcataanttaaccccatttnggcctggaaggtggggtcccgaaacct

SEQ ID NO: 4331 - DNA, 214 bp, Homo sapiens
  misc_feature 33, 49, 68, 70, 77, 85, 88, 89, 112, 115, 135, 155, 176, 191: n = A,T,C or G
agtccccgggcccttccttgggagggggacgtnagaataacccccaacntaatttaagttgcctaaancntgggccnggccttcntgnnaagcctttccgggaaggccaaanaantgaccattccaagggagttnggaagtgaaagcttatgaangggaaacactttgcctcctgnggactgggccctaancggatgaattaacctggatttgt

SEQ ID NO: 4332 - DNA, 121 bp, Homo sapiens
  misc_feature 17, 30, 42, 48, 50, 63, 72, 83, 84, 87, 104: n = A,T,C or G
ttactttcctttctttnggatttacccccncttaatccagcntaaatnanttgttctcctagnctaatttanttatatgttcnntcnatataattccaatatanttgcggccactctaaat

SEQ ID NO: 4333 - DNA, 459 bp, Homo sapiens
  misc_feature 314, 356, 380, 382, 406, 407, 412, 415: n = A,T,C or G
gtttctcatgtacaaggaggaaaagaggccaaacacggaaaccccatgcagtgactgcctcctttggatcagcatgttatgaaaagtcggtacctgccattctgattgactgagagcaacagaaaacccctgaggccttccggttcagttgggattgtaatgatagactagcaagacaaaagcctgccagaacattagcttcaactgtatgacaatgcccttcccaagaagatatggtgctgtggagatgaataaagattggaaacgtggatcctgtcagcagcactgatttcactcagaaaacttgtatactnggaggatgctgtgtctgctcagggttaggactccagcaatgngtgaaaaattcatttttcccagtngnaaacccttatgctttttagttggnncaagnggnaaccttgagggtcccgctaatgttgaagcttaaacagaaatagg

SEQ ID NO: 4334 - DNA, 187 bp, Homo sapiens
  misc_feature 54, 67, 87, 106, 118, 164: n = A,T,C or G
tttgagcaagttcaagccctggttaaagtccaagctgaattgggcctccgctgngccatttaaatgngcggccgcccatttaaatgngcccgcttattgggcccanattctttttgcntttttacccctgggaaggaaaatactcataaagcccaccctctggnttattttaacccccaattctttt

SEQ ID NO: 4335 - DNA, 221 bp, Homo sapiens
  misc_feature 17, 25, 34, 42, 53, 70, 77, 86, 89, 94, 96, 122, 160, 162,165, 182, 188, 195, 196, 198, 200, 202: n = A,T,C or G
acatctatggtggacgnaacacaancgcctcatncccaggcncttcagaacgnggttgcataagagtggnccgccgngtctctccnagncctgnangggctgtatttggaggaaaaggaccnacatggctttcattaaactgtcacctcaaggacataananatntgaacaagaatcgtctngacacntttcttnntngncnaacaaagaaacaattaaaa

SEQ ID NO: 4336 - DNA, 312 bp, Homo sapiens
  misc_feature 16, 18, 69, 79, 86, 94, 123, 141, 143, 149, 153, 158, 199,200, 205, 245, 269, 290, 297: n = A,T,C or G
gacgttaggagtctcngnccagtggtgtatgctcatgaaactgctgtcttatactagctaacatggganatggggcccnggcaggnctggccangcctgacctcctgtgtactaggggccagntcaggttggaaaataggntngaagcngtgnaactnaggatttttataggtggcatccctcaattgggttggacccnnctcantgaacggatcccccctcctttgctaaattaaaccacccgnaagcttataggggaaaaaaggccnttatttccctccctttcaaangccttgntattcccccaatccc

SEQ ID NO: 4337 - DNA, 221 bp, Homo sapiens
  misc_feature 91, 115, 116, 119, 122, 124, 129, 141, 146, 148, 150, 153,154, 161, 163: n = A,T,C or G
cgatgagtcacacctgacctctcacgagtgcatgcgttgccccagacttgatatacactcaatgcctcatatggggtagcatctgagaccncagcttccctttgttcttgatganngtnaantnggganacatatggcttncccangngnccnnatgaaangncctttacatttaaagattaacttagggaaaagggggggtttttttccaaaaaaaaatt

SEQ ID NO: 4338 - DNA, 252 bp, Homo sapiens
  misc_feature 19, 44, 62, 66, 71, 77, 108, 116, 130, 148, 173, 177, 180,184, 189, 191, 198, 199, 209, 213, 218, 225: n = A,T,C or G
actggcatgttaacgacangcgatccaatcagagcggagctctnggaaccatcctgtggagnggangcatntcaaanccatgcctaccggcatcatgctcattgcccnatccattntgaccacacctcantaccctgcgcttataaanaactacccactcctatcttgggganaccnacnccancattncntactgtnnttttgtcggnaggngtcgnaataaancactttcttttgtaattcaaaaaaaaa

SEQ ID NO: 4339 - DNA, 192 bp, Homo sapiens
  misc_feature 19, 24, 38, 44, 48, 60, 72, 87, 98, 115, 116, 123, 127, 132,138, 151, 152, 159, 169: n = A,T,C or G
gctggtatagaacccccanggctnttatccatacacantcggtncatntgagtgttggcntgctccactgcntgtgcagcctacacnaggaaaggcanggcttacagaaggatgnnccttcantggnttgcngcactncttgcactcttcnncacgatnatggggaatncatcttaataaaaactttttgga

SEQ ID NO: 4340 - DNA, 362 bp, Homo sapiens
  misc_feature 55, 57, 58, 60, 72, 77, 78, 79, 81, 82, 102, 139, 172, 214,216, 225, 251, 256, 260, 263, 267, 274, 294, 312, 316, 333,339, 345: n = A,T,C or G
cagaggaaagagccccttgcctggaaccttgatgggtccctggtgacgcctgggnanngnaatatgataggnggtgnnncnnttacggttgggtttctgcgnggctttcttacatacattttcattggtaaacccaaanacgaaatggggccaagccaactggtttaaatgncccaagctttaaattggttcttgggggggtgcgcgatggttntnatatttccntatgtttgcgtcccaaaaaaccattnttcangccnaangttnttttttnggagagcaaagaggaaattnccaaatccttacccaccncccnttttttttacccccccnaatttnttttcnacataatgtaaaaaaaa

SEQ ID NO: 4341 - DNA, 438 bp, Homo sapiens
  misc_feature 29, 40, 56, 167, 195, 365, 368, 385, 392, 397: n = A,T,C or G
gacataaatttgggatgttgcaatttcantcaaccagaanaattgacaaagcttgnggaaccttttgtcagaggtgaaaccatgaacaatgggagcaactcaggaaggcatttacggggacatctgaacacatcctgccatcttagggtggaactctaaaagcattncttcatgatttcaatatgttcctccagngaaggagagtctactacttattccagactctctaagcctcttaatcagaaatactgtctttatagtatacctaaaatcagattctgtagttgaactccatttcctcttgttatatattagcaaaagataccaccatcagagggggccggttaaataaagtttccttccanctnactgaatctatggcagnttttttnaacgnggggtccttccaagagctctggacttcagaatcactggcag

SEQ ID NO: 4342 - DNA, 342 bp, Homo sapiens
  misc_feature 21, 24, 30, 47, 55, 56, 59, 64, 67, 75, 80, 87, 92, 98, 135,150, 161, 189, 239, 288, 320: n = A,T,C or G
attggacaaataatacttcantgngaaacntttccccaaccacagcntccacganngcntccancantgaaaaangtttntaggggncgctnaataangatgtggattcattaaggagaaaatcaaagtcacccntagagagtcttgctntgtcaaccaanatggagtgcggggggcatgatcacgggntcacttgcagcctaaacctcctggggctaaggtgatcctcccacatcaancctcctgagcagctgtgcaccaccagacctggctaattttgggtttggnttggtttttggttttttggttggttggttggntgggtttttggggaaaaaaggg

SEQ ID NO: 4343 - DNA, 250 bp, Homo sapiens
  misc_feature 26, 36, 39, 41, 49, 50, 63, 72, 78, 89, 100, 102, 133, 150,163, 182, 194, 195, 211, 224, 226: n = A,T,C or G
caacggactcacaagattatgggccnccatatgatnatnantctcatgnncgcattgacaacntactcaaanaattgngctccaccatntgattcacagnanatgcttatccctgttgagataattattccanaccccacacacaagggncggcccaagttancggacctaatttgttttanaaggatttcgtnncatcactttggatgangagaagtgggatntntgcttattctaaggaacccgggac

SEQ ID NO: 4344 - DNA, 279 bp, Homo sapiens
  misc_feature 16, 34, 40, 44, 49, 52, 57, 67, 84, 86, 94, 98, 113, 115,128, 151, 175, 182, 214, 236, 250, 259, 260: n = A,T,C or G
tgatggcgccccaccntagggattttggtcttgncttacnctanctgancantgtcnttgagacccnacccggcatcttaaggnanagttcttntgtngttctccccatgctngngaatgtactatgngagatcctgacctctgcccgcanaacattggtcttaactgcaccgtnctatccnaggaacctataacgatgctaatgataatctanccaccctttgctgactcctttntccgacccaagccnacttgcccnngggttaaagaccaagcctt

SEQ ID NO: 4345 - DNA, 113 bp, Homo sapiens
  misc_feature 30, 43, 65, 66, 67, 70, 76, 88, 96: n = A,T,C or G
aatgattttgaaagtgaagagattaaaacnaacatgatcaggngagaataaaggaacgagaaagnnnttntacacncttttttctccntatctctntttcctctttctcttct

SEQ ID NO: 4346 - DNA, 328 bp, Homo sapiens
  misc_feature 17, 21, 39, 55, 61, 91, 100, 108, 127, 135, 144, 148, 162,168, 170, 171, 172, 174, 176, 177, 178, 180, 185, 189, 190,191, 255, 272, 278, 302, 305, 310: n = A,T,C or G
ctgaaaacattcgacangctncaaacatggccactggantgctgctgattgcctnacctgncatgtccatctctcccttaggtgataatcngaccccctntttttcanccaggacacaaaataccancttgctanaacatactncaantgtgttattctacnttgcancnnncngnnncnacccntggnnngaggcatgcccatgaagtcccaaggtacttgcattctgaggcatgaggactgctcaagcccccnagacccattatcctgtncatttnatttcatacactgcactccagccntgntggantgagcgagaccccatctc

SEQ ID NO: 4347 - DNA, 833 bp, Homo sapiens
  misc_feature 20, 38, 42, 79, 85, 105, 106, 128, 172, 177, 193, 216, 223,345, 442, 450, 472, 481, 572, 684, 718, 783, 802, 813: n = A,T,C or G
gcgcctacactggcttccanggcatctaccccatatanctgnctagagggaattttacccaaggccacttggacgacgnaacgtnggtaggctccgacgtcgtgnntataacctcgtggagtattacnagagcacgtgtggattgactcacaaaacatatagcatagagatntggcntccaaaacatgctgangcactcgcgttctatacataggnccccggntgcccccaagaaagactttttggggtttttcccttcaattggccttgggccaagaaattcaaattccaacttggaattggttccccaatttcccctttccccaaggggtgggtttttaaaangtttccggtaaaggggcccaagttccccttggaagttttggttttggaaggttggaaggaaaaaagttaaggggaaaagaaagttaccgccaagctnggaattanaccatttggaaggggaagccangaaaaccangaaaagaaacttctttttttttggttggtgggaccccttgggaaaaccccaaaaaaggggtccatttccaattggccttgggggggccaanaaaagttggtgggggattaagggggaaggggccaaaaaaaaggggggaaccttaccattttttccatttggaagccaccttttaattttaatatttatttaaagaaaaagtngggtttaatttgggccttgggggccacccggggngggctttcaaccgccctttatttaattccccccaaaccacttttttgggggaaggggcccccaanggccattggaagggaattnaacccttggangggggccgaagaaaggttcc

SEQ ID NO: 4348 - DNA, 107 bp, Homo sapiens
  misc_feature 19, 32, 38, 40, 45, 57, 58, 74, 87: n = A,T,C or G
cattgtggagttttcaacnaagcacaggtgcntttttncntgggnaaagccatagtnnggacttttctggtttnaccgaggtgacanaaacttgtggaaaataacct

SEQ ID NO: 4349 - DNA, 205 bp, Homo sapiens
gaggtgtgtctctcggcgcttgggcctctctgggatgaaagttttaagtgcacaccgaaggctttgccaagctctctcttcctgatgccatgatgactatgaacagcagctccgtggcctggatccagagggaggacaatgacaccgtgatgtataatgtgaacaagaaataaatctttactgtttgagccattgagaaaaaaaa

SEQ ID NO: 4350 - DNA, 177 bp, Homo sapiens
  misc_feature 37, 61, 76, 146: n = A,T,C or G
aatttgccaaccccagagtggcgaccatctggtgagngccaaaccccttccaaatggttgncccggtctaaagtgnctcatctcaacccagggcttttgtaccatagcaagaggggcgacaatttaaagtggacattaagaaatanaccattggggcacatggtggaaaaaaccaaa

SEQ ID NO: 4351 - DNA, 210 bp, Homo sapiens
  misc_feature 16, 17, 21, 35, 36, 48, 50, 55, 80, 91, 100, 127, 130, 190: n = A,T,C or G
tgttctgatgatgtgnnggcnaccgctttgccttnnaccatgatcagnangctcnctgaaacctccccataagctgatgncaccatgcttnctgtacatnctgcaagaactgcctctctacttcagnaancttttgcactgtgtcaaagcaccacttctttaccacctggcatctactgctgctggttgnatctttatcttacgaacaga

SEQ ID NO: 4352 - DNA, 316 bp, Homo sapiens
  misc_feature 36, 37, 209: n = A,T,C or G
agttcttctctaagagactgagtgacggatatttannaagtccacacgctacgtataagagacctgaataaatttaaatatgatcatctgcacatattttgtgtattcacctacaaaattatgtaatctgttatgagacaattttcaagttaggaattcttcagtcgattctactcttacatcaaaactccatgcagcaatcagcctanacaacctgaaatgttgccaggccacggaaaacctgccacagtaagaaaatctaccacacagaaaatctacaataataattctgttcaggtatgaataatataaaaaa

SEQ ID NO: 4353 - DNA, 274 bp, Homo sapiens
  misc_feature 112: n = A,T,C or G
gacaaagttgggtttgacagcatggagcttatcgatgcccttgacacagaggtcactgacacccttgacaaaaggagtttcgggggagtggagaagccagaagccagactgnaggagactgaagagcatacagacacctggaaatagactatacatgaaaagaacaacagctgtgtgatcactttgggatacccactgtttccaatgctgactgtttcattccccaacaatgtgtttcaaaatggccctgactgacattgctgccgtgttctat

SEQ ID NO: 4354 - DNA, 329 bp, Homo sapiens
  misc_feature 127, 144, 165, 172, 232, 242, 259, 298: n = A,T,C or G
tttccctctacatgtgtcatgcacttcccagatgtgatgatggtatttgaaagagcatgatctggaaatcctgagccgtgctgccacaagaaaatggatgcacagaggacaaggccaggcagcgcangtcttcattacactganactttgcctgagtcccatggngccccantgccctggcctgggcacatcagcactgccttctgtccaggccccatgagtctcagatggnggaccctggngacggaaggctgggtanatgccatggacctttccataggtcatagccacagctgancacttggtgtcttactactcaaaggaaaaga

SEQ ID NO: 4355 - DNA, 152 bp, Homo sapiens
gatgaagacaagccacagggaaatcttgggagagtcctatgttgaatttgccagagccctagtatggaagaaaccatagaaaagaaaccattatccctaaaccatcatcatttggagagtaacaacaacaacaacaacaacaaaaagataaa

SEQ ID NO: 4356 - DNA, 251 bp, Homo sapiens
  misc_feature 114, 117, 235: n = A,T,C or G
ggatgaaggtcagagtgtcaaattgcagattttggatcctcaataatgggccgctgtatttaacctcttcaacttcttttctccacttataagaaggaacaaaataaaatgttntgnggaagtttatattgaaatgaggtcaggtaaactaatgactgcttggtattttatgacaagttttataaccttggagttgccataactttcaaacgatcatcaataaagttttattgcngaagggtaaaaaaaaa

SEQ ID NO: 4357 - DNA, 460 bp, Homo sapiens
  misc_feature 224, 276, 282, 338, 350, 369: n = A,T,C or G
ggattttgcaggaagtggaagaggcgtgtagaaggtgccagaggacagacaggaagccaaacctagatgtcttcccctgccttcattgggagggtgctgagccacgggttccacctctgccaaaggcacacctaggagactcctcatgtccagctgagaagagggggacacctcctgtctgagactgcagctcacactgctgcatgcttcctggacaccatctntctgaccttggtcgcatctgcctagcctgcagctacgttctctgacttccanctcttnctctttctcccctcggtaataccaaagtctcaagaacacagccctcacttctaganagaaagggcttnaccaggacccacctgtgtnggcccaggtgtgacctcatgtacaaacacatctcccaaaatcaccatctcgtcatcatggatcctagtctatccatgagttaactctcatt

SEQ ID NO: 4358 - DNA, 257 bp, Homo sapiens
  misc_feature 153, 190, 237: n = A,T,C or G
aatcaaggactaccactgcacgaaaaatgctgattgctgtcacatagacctcaaacagaatggaacctcagacagaccggaacccgaaagtagatgaggaaattccagaaattcctcagccctaactcactttagagagcccccttacctcancctttaacaatcctttgcttgtaagctatcagggagntttggtcttaaatgttacctgccagttctcctcgttttctgctctgnaataaatgcctttttgtttg

SEQ ID NO: 4359 - DNA, 247 bp, Homo sapiens
gattatccacctcaattctaaatcctcttggagatcctgcgacttgaacggcagaactctgcaaatgagcaccttgtgccactttccaagtgggaggaagacatataattataattctcacactgaagagaattcaagaaaatctggggaaaagtttattgaaaaacatattgacatatcagtattatacatttctcttattaaaccaaaaaataaaatttcttttgtggactagttcaaaaaaaaa

SEQ ID NO: 4360 - DNA, 440 bp, Homo sapiens
  misc_feature 117, 211, 252, 261, 267, 339, 341, 360, 369, 370, 418: n = A,T,C or G
gctaattctcagagatggggttattgggccaaaaaagcaaactatggctttccgaagctctcattgttcccattatgtcatgcatccctgagatgcagtcagcagaggattctattngagggactaaacactcccggggaaagcaggaagaaggagacgggaactaacatttgctattgagcgccaggcatcgtcctacaggcttcgaagngaaccttggatgtgctgctgatctgacctgcccagatttgncatcattgntattgncttggcctcttatgaagacgttcacccagcaggacctcagaagctttgttcactcgatctcatttaatcctnancattcgtgccgtaaggaanattttaccnnccccattttacaaaggaggaaacgggaacctggggagattaagcgaangcctcacaagatcatgaataga

SEQ ID NO: 4361 - DNA, 144 bp, Homo sapiens
gacagtagacttggcttcagagggactaggtgactcctccagggacacagagcatgttagaagtacagtggacaaatggctttttccagggaatctcatacttcatgactttaaagagtaaacctatctgtgatccaaaaaaaa

SEQ ID NO: 4362 - DNA, 317 bp, Homo sapiens
  misc_feature 80, 82, 86, 112, 113, 125, 167, 203, 230, 232, 239, 247,260, 278, 293: n = A,T,C or G
actttctaaaatcttaaatgcctcattaaattccctaaacaattataagaattaattaccaaatttcttacattttcctnancaancaaagccttaattttttgaaattggnntttccaagtttngaacttcccacccactttacacttacttcaaacaagcttgantggcattaattcaataaactttggccaaaccttgantaataattctaaagaatgcaaatcgcnanacttcantttctcgnaaacccaacgcanacttcttgtcaagaaaanttaaaaatcaaaatnttgactttcccttttaaaaaaaaa

SEQ ID NO: 4363 - DNA, 457 bp, Homo sapiens
  misc_feature 52, 218, 244, 251, 274, 352, 358, 361, 362, 371, 380: n = A,T,C or G
catcatgttcagccagacacaagacgggcttgggaagaggatttaatgttgnttcttccaactctggaaacaattccactagaaggctcaatagttcagctttcagaaccaagagtgtttgcaaaacatcaagattccatagaggaattagaagagaattttgcagatttcgttgcctgaacattaccttccccaccaaccaagaaattgcctaaatngtctttaacatgaccatctaactttntctttantagaacaggatccacagctgcanaaaccgtgacaattagggagactaagagaaacttccagcagtgatttctgcagttaaagaatttcaggaattaaaccnacctanttnnttggaaatntcaactcanctactccagacaaaacctgtcactaatactgaagaaaaagatttaactttaattatgtgtattccattgcggcattt

SEQ ID NO: 4364 - DNA, 409 bp, Homo sapiens
  misc_feature 43, 76, 78, 82, 99, 104, 202, 232, 310, 351, 357, 367: n = A,T,C or G
gccgtctgggcgagctacctggcattaaagtcagaaactgganggaacctgctgggaaagctgtttctgaaccaanangaangggatggaaaaaattancttgnccaaaaggaatgtttgcccataagcaacctggcttttcctttccctggacctccttgggaaagtggaacctccccttcattttttccaagaagtaagncaaagggaaatttcctgtggccctcttacnccatgggcttttgggtttacccaaacctcaatccccttggggggggcccttgggttttcttttctggtggaaaatagngaaataattcaatttcccaagcacctcaccaaccttctaangctggngaagtaaagngctcccaaacttttgccaaaatggctggttaagttaaaaact

SEQ ID NO: 4365 - DNA, 159 bp, Homo sapiens
gtttgttttgtctcctcttcaagacttgaagacaggatgatttgggtccttaaccactgcctcctacttcaaacgagatcccttacggagctgagctcagagccgaccctgtgtgtaagggcataataaatcctggctgaatgtcccgtcaaaaaaaaa

SEQ ID NO: 4366 - DNA, 246 bp, Homo sapiens
ttcagcacacagccagtactgaaggaggaattgaccaaagggagagattatctccaggactcatgctacttggtggttttgctttcagctgggagcctcaatccactgtcaaatggaaacttaaagaacatcccgatgactatgcctgcgcaaagagcaggaaaactaaaaactattttccacaatgaatttggcaacttcctgccaagctgaacaacttagtgctgcagattgcaaaatcaaaaa

SEQ ID NO: 4367 - DNA, 345 bp, Homo sapiens
  misc_feature 17, 33, 36, 85, 109, 113, 127: n = A,T,C or G
agatcactctgtttgcngacactattataaccnggnaacctgagagctcctgaagatggccacgatcatccgacaggagctggtnacccaacaacttcatcgctttgcnggcngcacgtacaatggntaaaaaccagcaaaaccagcattcatgccaggcttcttggggtttatctggattttgcctcttataagttgtaaggccttagagagcttcagtttcttcatcaataaaatggggctaataatagggttgaagtaaagagtacggacctctcattgcactagctataaagtgctagtgcatagtaagtacctaataaatgttagttaccacaaaaaaaa

SEQ ID NO: 4368 - DNA, 216 bp, Homo sapiens
  misc_feature 20, 40, 41, 49, 55, 75, 76, 78, 142, 153, 154, 159, 172: n = A,T,C or G
ttgcatggacaccattgtgnaaaccttcctccgcacctgnnccaggctnttgggnatgccatcaacaaacccatnngncctgtgtttcctagcaccctgggattccagctcgtcagctaagaactggccatgctgacgaaanttgcttatgcnncttgngacatgtgctggntcttgtggcatcaaccctgaaaaacatgttggtcaaagaaaaaa

SEQ ID NO: 4369 - DNA, 420 bp, Homo sapiens
  misc_feature 366: n = A,T,C or G
gaactgaggccaacactaaacataagttgcagagctggcctgtggtggaactcacaagtcttattggcaatatatgtgaggagacaaaaagcaacatatggagaaatacaaaaatatactccctagagatactgcctcttcagatgtcaagaaaaacctggatgaaatgaagcaagagtggcacgctgcaaagttacaaattcaaggccacccacagaaccaaacattaacacttaggtggagctggtctcttgggcagcctgacatctggtccactcctctgtcctatgccgggatcatcatgaccgtagagattatgtcactgttttgcatccttgttacataactcagttcctggtagattgnaagtacacagaaagcattttttttatttaaaaaatgggttgactgaaaaaaaaa

SEQ ID NO: 4370 - DNA, 309 bp, Homo sapiens
gtgcttgttgctgttttcaagatgagtgcacagccaacattggtgcctcgatgggcctatctccttcctggaatgcatttcaggatctcgtattcagaagacaacagctttagcgaggagggcactgtgactgcaggtgggcatctgtgcttccgcccgtgtgggacccctgggacacttacgctgggggaggatgtggttagtggccacacaaatgcctaaatccaaagacattggaaagtgaattaattcactaaaaaataggttgtttctttagtgaataaaataacttagatactcaaaaaaaaa

SEQ ID NO: 4371 - DNA, 343 bp, Homo sapiens
  misc_feature 105, 157: n = A,T,C or G
ttcttttggacccctgacattaccatgaaaatgtgccagtccagcctgccagagagatgtgagagacatgtggaagagaactgagtcatcccagccaaggccatnctagaccatccagctcctgtcagcaggacacagccccattaacagagccacncagctgacccataggcttgtcaacagaaataaatgtttgctgttgcaagccaccaaagttttctgattgttacacagcagtaactactccattcaccacatttgcttaaagtgttggtgcctgggggtgacccccaacttctgcaactaaaatggtgaataaattcctgtaacttgaatcaaaaaa

SEQ ID NO: 4372 - DNA, 535 bp, Homo sapiens
  misc_feature 26, 46, 63, 76, 87, 88, 96, 104, 116, 117, 126, 133, 139,152, 159, 164, 165, 192, 199, 212, 221, 234, 235, 237, 265,291, 329, 350, 357, 399, 421, 423, 426, 427, 435, 440, 443,451, 454, 461, 474, 475, 478, 514, 520: n = A,T,C or G
tgggggaagctacctggctttttggntcaagaaaactgtagggggntttttttgaaaaagccngaaggatttaganaaccacctttnnaacttggnggaggggnctcaatatatannggcatggantacgganatgggntttttacaaaatnccacccntaccnngggattgacaaaagaatttggcaaagngcacaancccttgggttgtncattgattnaaatggaaaaaanntnccttaaacttttcttttaaatgggcttnggggacaaaaaaaaggggggaccaanattaaacctccccccaatgtttttttgaggaaaaaaangggggcccaggaatggggggngtttaanaaagaaattgggggtttttttttgaaggtttcttgtgggccnttgggttgggggaggacaatananccnncaagaacnttttnccnccaaagcnccnaagtccnttgggagggaagnnggncccttttttttccggggggggggcaatgcccaagtngaaacncaagccccccaaacc

SEQ ID NO: 4373 - DNA, 391 bp, Homo sapiens
accaagggtgatggaaatcatcagacaccaagcagctcatgcgttccagaggtttcaggactggacgttggttctgtggttccccgtttggcatctggctttcattaggccataaaaaacagtttacggcccttctggttggaacaataactttcacagtatccgtagtggctgagtggttatcagaggaagaaagaccactagcagtctgcgtccttgctgtctgtcatgggcggtgccagcctacgtgttaacctattcatctcgcttcaaccttacacgggaacctgaggtgttggagctctctcagcccaatagcctccccactaattctaataaaaagaggacaagcagctgcagccagtacagcagcctgcaccaggaaaaaaaa

SEQ ID NO: 4374 - DNA, 406 bp, Homo sapiens
cacgtgcccagcttcctttcaagtctctggccaatgcaatgtgagcagaagtgaaggggcaactttcaggtgatgacttggaaaagaaagcttagtcctctgcttctcctgtcacccgaaagagaaacagaggcttgtcttgttgaagccagtgtgtttggtgtctttttgtatagtggcttagacagtggcctaactagaagaccaaggctcaaaggaacacattttgagcttctccacagtttgagaacctctacattacctacaccaagccttccccagcactcaatttatggaagaccatttctcttctcatgacacatgtcctcatgttgctttggcctgttttaaagctttctcaactccatctcaataaagaaatctgcagctttggtggaaaaaaaaa

SEQ ID NO: 4375 - DNA, 235 bp, Homo sapiens
gtggggtctttcaccatgaactcctcctcagagccagccatctgcacgggacggtgtgttacttcttctcacagtcgggccctttccaaacattcagagctccaagatttatggcacatgtgtttcaccttgaatccagaagagcccttggcagtgttggtgtgttgtgggctaggaaacttcaggagcaacagagcccagtgacgagtcctcgatcactggcgccttttttttt

SEQ ID NO: 4376 - DNA, 332 bp, Homo sapiens
  misc_feature 19, 284: n = A,T,C or G
ataagcagcctttgggcangctgagaagacaaggcgagtatcctgctcctaaactcagttccctaactcagcacccactcctgactcctgcttggtctactcctgcctcggtgatgttcaagctcagtacttcttccacttcagccctcaggcaggcaaaaacacttccttatgcctcaatgactaacatctgtacctatttattcatagcacaagtatcttggactcatgaattcctatatttaatcactcataattcattcctttatatactattttgatgntcatatttgatccattaaaagggctaatgagagtcccctcaaaaaaaa

SEQ ID NO: 4377 - DNA, 136 bp, Homo sapiens
attgtaaactgcacaagaacaaggaccttgcttgccccacttggagcagtatctgcctggcacatagttggcactcaacagattcttaaaggagtgggtgaatgaatgaataaaaaaatgaaactggaaaaaaaaa

SEQ ID NO: 4378 - DNA, 375 bp, Homo sapiens
gtcataaagtgtaccagctaactcaggggactgaaaacaaaattaagaatgaggatacctcatcaaatgaaaacacaatgatgaccacatacacgggtaaccagagctatactacctttcctgggaatagcagagcacagatgtaaagactgaaagacgacgtgttatattttggtttgtgattctgctaatacccccaggacaatcatttctgaaactatttgtacccttacttgtatttcagactttagcgcacagttaaggaacgatttttaatacattttcctccagactactagcatttctttatctatattaaaattaaagattagtgttaaaattaaaaactagtatcatgaaaatcccaaaaaaaaa

SEQ ID NO: 4379 - DNA, 196 bp, Homo sapiens
gggtgtgcaggttggagaaagtcattccttcagactggagagaagactggcaataacacagcagacaaataagaaccttcaattttcaagaaaccagtgcagcaccgactagccactattgctataatcttcacttccgttttgtaaaatgtcattttttaaagaaataaaacatgagattgactctaaaaaaaaa

SEQ ID NO: 4380 - DNA, 227 bp, Homo sapiens
  misc_feature 109, 122, 137: n = A,T,C or G
tggattatcaagctcctggaagtgaaagaatttcacctacactcttcattatggtttcacctgttatatgggctcaactttagaaggatctcaacatgcactgcctggntgctcctacttgnaattaccaacactgnttttttccttttaaatacctattaatgcacaaaaaactgagacaacatacattaaaaataaaatacatatctacaatatttaaaaaaaaa

SEQ ID NO: 4381 - DNA, 554 bp, Homo sapiens
  misc_feature 134, 246, 408, 476, 500, 532, 533: n = A,T,C or G
agcaatctcccatctttaacagatgaagcttaacacaagagcagcacaaaaaccgtgaaaaagaagggtaaacctgagcagttggtaggggcaagtggaaatgaaagcacagaagaacagaaggcaatgtgcanactcctgctgtaaagaaaatacatctgaagaaaagaaaaggtcagatggctgtgcaaagaatgaagagaaatctgatggatcaaagctaaatgaaaatgtgtccaatgcgtnttctttctcaactttcttcacttctttcctacataccatgaggtcatattttgggtggtaaaatttaaagtagttcgatataccatgggctaatgatgagaactcaaaaatcctctttagaaaattgacaatttgtttatttccattgctactgttaatcgngcaaggaaacgacacaatcttctttgaacatttctgaatggttaaaaatttaaaataagatgcattgnatatactcacttttctatgactgngcctatatcctacacaagtaaaaagattatgnntgccccaaaattgaattatta

SEQ ID NO: 4382 - DNA, 129 bp, Homo sapiens
  misc_feature 23, 29, 36: n = A,T,C or G
tttataagcatatgaccatgtancccggngggtttngttttgttttgctttttctttttagtttgtgttattaagatatgttaattagcaggagatatttttaggcaacaactctagtaaaaacaaaat

SEQ ID NO: 4383 - DNA, 161 bp, Homo sapiens
  misc_feature 29, 44, 56, 65, 67, 72, 82, 83, 84, 86, 107, 118, 138, 140: n = A,T,C or G
ctgactgccacatcaccagatgcaccatntcttttctaactccnacatgagccatnccccttacntnttacncaagcatacnnntnattcaaagcacacacaccttnattcgctcctntgacagataaactcccaggnangccaaataaccactaaaattt

SEQ ID NO: 4384 - DNA, 174 bp, Homo sapiens
ggagttgaaaacaaggctacagtccgcaagtcatgataccacgataaacattttaaaagaggaaaatttaagaaaatcccagtgtattcacctatgaagtgtaaagtcatgaacaacatgagaacaatgcaactatggcacacatttagacgctgttacgagtaacaacaaaaa

SEQ ID NO: 4385 - DNA, 270 bp, Homo sapiens
  misc_feature 22, 60, 67, 69, 71, 76, 79, 85, 96, 106, 108, 112, 113, 115,122, 134, 138, 143, 144, 146, 150, 157, 166, 168, 175, 182: n = A,T,C or G
cttgaaggacctttttgggggngcttctttcccactttctatgcctgcctttaattctcnggggggngngntcggntgntctttnctatggggggnggggggtggntntgtnncntggttgnttcttattgggngggnttttnngntggngcttttncctaggttntnaaaaaanggtctcngatacaaaacatcccataactcttccaccccactcccgtcaggaacaacccaatcaaaaataaagtcattggagaatttaaaaaaaaa

SEQ ID NO: 4386 - DNA, 400 bp, Homo sapiens
tccagatgcatctacttgggcagaagaagctttctatcacatttcccatagtgaaaggccgaggcgaatgcacacaaagcaggtccctacctggaggatgagataccatggatcagagacaagccacccagctaagaccccagaaaaaccagctggtaaccagcatccaccactgcaggtgagggaggcacctgcgctgttcgagctcctagatgactacagcgcaatgtatgaccctagtggaagagcagcctggaccaccgaattatgagcaaataaagcaaatattgtgtgtggccactaaactgtgggtgggttggtttgtacaaaacacaagctaacttacacagaagaatagttatgcaaataaagaagaaaattatgaaacttacaaaaaaaa

SEQ ID NO: 4387 - DNA, 352 bp, Homo sapiens
  misc_feature 136, 157, 224, 244, 258, 260, 313, 314, 327: n = A,T,C or G
gattaagtcaggaactgagatgtggacataatgcttgacgttaagcataagaatgagaaaatgcaagagaatcttagagtccttaatgaaccaatagaagaagcagcctcttcttctgtgagcaaaatagattctngcggtaccagccatttgaggngaatgctacatctttgatgctgagaaaacatcaaaatggtatgaattttgaatttgtattcatcagntctgcttgtaaattatgatnctcacattcatggngngggtggggttataacaatacttcacctccctgagacttttttacttacctgtnnaatggggaaatanacaccatcctcactgacaaaaaaaa

SEQ ID NO: 4388 - DNA, 169 bp, Homo sapiens
  misc_feature 45: n = A,T,C or G
atgagaaaattaagacttggcaaagattaagtgaaggaagaagantgaaatggaacccatgctggtctgacctcaaaccctagcctctttctctctagaattaaaaatatgaaaagcaattgccactgggtagaagtataaatgactttttttctcttttaaaaaaaaa

SEQ ID NO: 4389 - DNA, 274 bp, Homo sapiens
  misc_feature 16, 34, 39, 40, 53, 57, 64, 65, 79, 81, 97, 107, 142, 179,181, 191, 195, 218: n = A,T,C or G
ctgtctcatttggatnaggatgagtaatctctcnatccnnccaggattagggngttnctagcgnnttactgagccattntntccatcctggcaaganaaacctgatnattcttttctcattacaaacaagacaaaaaacccncagggatgggccttccaaggggaaatgaactttgtgngnatttttttanaagngggtgctttccactggggacggngcctggcatgtagtaggcactcaatatgatattgatcaaagaaatttaattccata

SEQ ID NO: 4390 - DNA, 331 bp, Homo sapiens
atggaaaatatggtgaccagcagttgcagagtttgtcctgtcatctagagagagactaaagtgactcaactgcaaattcctgaggaagagattttggccaggctactggccacccaggaggtcagtggataggccacatcgtatgccagtcacaccaagaccatgtggatggagggatgcattatggacattcacataaaggtggcgagccggggagaccatccaattggtggccgttcaaatcccaggatttattttatgtgtgcctgctttttacaagtacttctttgccttcagtgtaaataaagaaatagtgtttttgaaaaaaaaa

SEQ ID NO: 4391 - DNA, 340 bp, Homo sapiens
agccagagccaagccatggcttatagtttcctcaaatcattcttgagctccagacaaagtgctggaccttggaaccaacaagaagcactgtgcaatgatcacctttcaagtaccacaagataaaggcaagagaaaactctaccacaagaacctaaagtatatactgggatgccttccagaaaatgaaagtggagtcctttccacatatatatggtttatggtattaagaaatgctatctctgagcccagtccttgaacacagattctgggaactagaaccatggatgtaatctacaagacattcaataaagatctgtaatgtgctcatcaatagaaaaaa

SEQ ID NO: 4392 - DNA, 353 bp, Homo sapiens
  misc_feature 70: n = A,T,C or G
cttgaaaatacatcaaaaataactggaatgaaaaagagcaccatcatcttgaacacagcttggaagaganagcacagatggaggaagacagcgtcacgcccatcacctggctctttcctcagagatggctgccccctcttttatactttctgtactgaacctagaaacaataccttttgccaactcagatgtgacattgttcttccagcttcattttacttcccaaccctttacttaaatgtctgattcctcctgagtcaaaatgagtgttttcatgggcagaaaaggagtgtaaatgggtgcttgataaatgtttattgaaataaatggaataggtctgtgccaaaaaaaaa

SEQ ID NO: 4393 - DNA, 580 bp, Homo sapiens
  misc_feature 24, 25, 44, 75, 102, 122, 132, 137, 171, 173, 209, 214, 221,223, 226, 239, 248, 277, 287, 298, 303, 304, 318, 334, 341,348, 356, 367, 373, 384, 397, 402, 403, 410, 415, 430, 453,474, 480, 484, 491, 496, 504, 519, 537, 559, 564: n = A,T,C or G
cgcccaagagggtccctcttatannaccggggtccccagaaaangttagaaacagggaaaacaaccccatgggangcgccggggctcgggattccctgaacnaccagacttcttaccccccnggaaaggggnccggnggaccctcccacttgtggacaaaagaatgccatnancctttttgggaaggcacgaaaagaactttcccaaanggctntttcacntnaantgggactatttanggaaatttnggggggccaaagggttacctttaaccctncctttgaagnctttgggtttncttcnnttttaccaggaaanggggaaaaaaaatggncccttgnggggaangaaacccnaagaaaaaatnggcctngggtaaaaaanttccctttggggnttttnnaacaaanggggncctttaattaaaatngggccgccttttgagggtttagnaaaattttttaactttcaatngggaancccncaaaatnccccngggggggncccttttttaacttngggggggggaaggggganaaattttaaaacccctttaaangttgnggggcccaaaaaaaaa

SEQ ID NO: 4394 - DNA, 269 bp, Homo sapiens
gaaagtgctttatctctccaagacacccttgaaaagagtaatggatggttccttccacctgatggagatactgaatctaaggctctccttactgccctgtttatcaacacatcctctgcacagaaggtgaaaaactatatcctactaccacttcacacctggagagttttttttgacaaaaggtcaagaaaatgtttgactctgttcaaatctttatggatgacaacaatctaatatgaatcataaacaaaatcaattctaaaaaaaaa

SEQ ID NO: 4395 - DNA, 199 bp, Homo sapiens
  misc_feature 172: n = A,T,C or G
gcaaccctatgaggggacacaggacagctgggatctgaactaagtatttatgagtctgtgagcctacagttcgctcctggcccagcaccttcaacccagccccttactttataggctttgccccttctcctgcaccaaggccgagggttggcatggcttgctgtaagtgtgnggggcctaaaattgggaaaaataataa

SEQ ID NO: 4396 - DNA, 157 bp, Homo sapiens
  misc_feature 39, 65, 92, 94, 98, 99, 105, 111, 112, 118, 119, 126: n = A,T,C or G
ggtgccgcagggatccaggcatctccatctgtgagcctncagggtctcttgcagaaagaaggaanggctccacccacacttacttggctagngncagnnatgcgncctcanncttatnnccaaggnaagggctggggaagtgtgggtttcacggata

SEQ ID NO: 4397 - DNA, 440 bp, Homo sapiens
  misc_feature 350: n = A,T,C or G
ataagaatacattaatcctctgagtttgaggctatgtccaacaggtggcaaggcctattcctgcacaggagacagctgctgggactaagggaagatgccagaaaaagggagcttcaggtgggaatccgcacagagcaattaaccttcaccctgaaacacaccggactccacttccaccactcacaaaggagagcacaacactgaaggccaaacactcaaagcatttcctagggcaaggatgctgaaagggtcatccagggaccagctgcagcagaatcccacgctcttctgtttgacaatgcggattcctgaaccccagcccaggcctccagaagtctgaatatctgtangtgggagtaagccgttgttgccagtcctttctcttacatcatcccatgtattttcttcttcacaactaaaccattatctaaaatgaaaaa

SEQ ID NO: 4398 - DNA, 212 bp, Homo sapiens
  misc_feature 39: n = A,T,C or G
catcccaagagttgatgttccagtcatgtcatctggggngagaactctgatgaaattccggaagtccgttgtgctgtgcgttctcttgtccctaattcatctcttcatcagcctctgccagtgagatctctggataactgtgccttagagctacggttgcctgtgggaaacagaaaagggttatcattaaaggagcatctgttaaaaaaaaa

SEQ ID NO: 4399 - DNA, 355 bp, Homo sapiens
attttcccacaggctgaccctgataaaggaggcaaatcgcaaagggactaacggtcacaccactgcttattgagtgacactgatagattgtgacgggaacctgacattgtcaagatttgtttacaatgaaaatgacggcaagagcaggcatttactccataccattggagaccacttagaaagacgtcaactccatcttaacaaccgaaaacaaaacttctaaataaaagtaaatattagtcacaggtgctacagatgttcagctgtacttcagaggtaggtgagagaataaacaagttattatcttttagtggattaagttcactctatttaaaaaatggtttttaaaaaaaaa

SEQ ID NO: 4400 - DNA, 118 bp, Homo sapiens
gatttctccaagaataacctaaggaccatctacttcagaatcagcaggggttcaagttagaaactgcagttttctggacctctacccagacttaataaaaacattagaaggaaaaaaa

SEQ ID NO: 4401 - DNA, 149 bp, Homo sapiens
ggaacacatcaacactagtcctggcatttggtcaatgatggaggacatgctgggacatacagttcaagatacaggaggtgttgaagaaccagactcgattaaaaaccaaatcaaatacacacttcttctattttatgtgtaaaaaaaaa

SEQ ID NO: 4402 - DNA, 286 bp, Homo sapiens
  misc_feature 236: n = A,T,C or G
gtaagagtttctctgttgacctagggctggaatcgctgaatctcaaggcttcattctgcaagcaagctcactctacaaagagggggaagctagctgccagcaacagttgtatcttcctacttagcaaccacaatgggaaaaaccaacattcccactgactcaacagaaaagcgaggtctctgattggccgcatcctgtgtcaactgcttgtacctgctcatggggtggaagcacantgattggcagcccaccaagaggtcttgcctaaaagaaccaaaataaaaca

SEQ ID NO: 4403 - DNA, 120 bp, Homo sapiens
  misc_feature 16, 20, 33, 59: n = A,T,C or G
tatgtgtcatgcactnggtntacaagagccaangctgaattaggccaattcttttgcanttttaccctgggaagaaatactcataagccacctctgttatttacccccaatgcttcacaa

SEQ ID NO: 4404 - DNA, 370 bp, Homo sapiens
  misc_feature 107, 193, 260, 267, 268, 280, 304, 350: n = A,T,C or G
ggtggggtctttcagtctgggactggacccagaaatctgcgtgtctagcaagatccctttggtgcttatgacttcacttggagaagtcctggcttctgactggctgngatcccacgtgctcacataacataacagcctggaatgttggccatctccaaaacaagaattagagcacacgacctgctggatctangagaagactgaatgaaaagcctcttggaactgccccagccagcaaagctgagctgtaggattgttgnaaccagnntgggggagaagnactggtagggatagccagatgaanaaaccaaagttcagaaaagtgaaatccaaggcccggcaccagtggnctcaaacctgtaatcccttc

SEQ ID NO: 4405 - DNA, 282 bp, Homo sapiens
  misc_feature 247: n = A,T,C or G
tatacaggtataaacatcactgaagaaatccaggtacatgtgaaacacacaagtgtggagctgaatggagccacgcgaaccaatacacaatcgtcagattcagacccagaccccagctgagacggcacctcgcaatgacttgctcccaaagaaagatgttctggccagagccctggagaccccacacctggggactggagaccgcagccatccacctgcaactctgttctcagacacctctgctgtncggtggccccaggaaagcagtgacacaaaaagaaa

SEQ ID NO: 4406 - DNA, 218 bp, Homo sapiens
  misc_feature 29, 60, 67, 81, 105, 108, 114, 122, 124, 126, 127, 133, 137,152, 157, 164, 182: n = A,T,C or G
tgcactatccctaggcatctgaatctcangtggaattcttactgaagctcaaaaattccnttgcgcnggcccacactgccngggaagtgccagaaccaaatactncanctttcnggctgganananngagtgnctcntctccacctgaattnatcgntaggccngagggtgaagagagcaantttcaataaaaatgcaaattcatagaaggcaaaaaa

SEQ ID NO: 4407 - DNA, 181 bp, Homo sapiens
  misc_feature 37, 44, 60, 61, 69, 70, 77, 98, 110, 114, 116, 120, 121,149, 155, 164: n = A,T,C or G
ctggggttgctagaccgctgtaaaatctacatgtgantaatggnaacacctctgggctcnngtgttgcnntggaccncaagccgggatgggttccttntattgggcatgnaccngnccanngagctggctggccctttctttctttttnggggcnggaaggacncttgggaaaaaaaaaac

SEQ ID NO: 4408 - DNA, 306 bp, Homo sapiens
  misc_feature 208, 240, 289: n = A,T,C or G
gtaccagcaaaatgattttctgaaaaacggaattgtggtattttccaagctgctcttgatcgagataaagtatttacatgtggccttgtcctagaaaccacatctccagccacctggaacccagtacaactgctctaagtccaagcaaatgcctcactctgctccaagatcactgcgggactcgaggcggctctcccatctctccctntgtggaagaaaagacttgcatgcaaataaagngggacatttctatttgcatttggggagatgcagccaaataaaatatgangaccacattaaaaaaaa

SEQ ID NO: 4409 - DNA, 313 bp, Homo sapiens
  misc_feature 203, 242: n = A,T,C or G
ggtcatctgtccctgagcctctgatcaatacggtccgacagatgacgtcacagatcatgacactttggaatccatgtgtgtggagatctagcctcacgtttcccacagagaacgtgcacttcaacaaagaacaagagatcatattttgtccaacaaagacagaagaaaaattatttcattccaatgataaaaggcttctgaanaagaaatccattcttcgttttgctttgctttttattcanttccctaataagggttttttggctgattaattgattgatgtggcaaataaatactaaagttgaaaaaaaaa

SEQ ID NO: 4410 - DNA, 125 bp, Homo sapiens
tttgtgttttgtagaaacgtagaacctgagaaaacaactggaatgcgtaagctcattctggagtttgttctgaagaagtaaggtgcatatgatggaacaggaagaatgaaaaatgcaaaaaaaaa

SEQ ID NO: 4411 - DNA, 191 bp, Homo sapiens
gttcattggtaatttgctaaaagaatgccagtgggaacagaacagaagcattttcaaggttaaattggcaatggttgtgactgattggatgaaggaagtaagggggagagattcatcagagaaagaaggcttctttaagcagcagaattgaggaatgagtcagaaaataaaagagcaaacaggaaaaaaaa

SEQ ID NO: 4412 - DNA, 347 bp, Homo sapiens
  misc_feature 28: n = A,T,C or G
tctacatggggaggacagagaagcgcanagaacaagagaaaagatgcatccatctgagatctaaaaggagacaatgagaatctctttaaaatggacatagaagactgcaatggccgctcctatgtgtctgctagacacctgccctctccatcctgctttcctgtagcagtcatatggaaacagaagcaagctgtcatggaccatgtgaacaagaatgagccctggggatggtgaagtaataagatgggaagataccaaagccctgactctgtggagccaatctaccagcctagactgttaataaactgagaaataaacttttatcttgtttaaagcccaaaaaaaaa

SEQ ID NO: 4413 - DNA, 167 bp, Homo sapiens
ttctagagactgggaagttcaagatcaagataacaacaaggtggtctccttgctgctacagcttctaagcaatcatctgaaatgttgacatcttttaaagctgtaatactcaggactgaacttcctcccactttattcatcttcattaggaaaaacaaaaatcaaaa

SEQ ID NO: 4414 - DNA, 425 bp, Homo sapiens
  misc_feature 23, 29, 39, 57, 60, 65, 68, 70, 83, 86, 94, 95, 105, 106,107, 128, 139, 202, 260, 261, 322, 327, 330, 339, 380: n = A,T,C or G
cctgcttaactcacaactgactntggtancactactganaccggcagctgcaccctnacngaaanctnangatgaccaatctntanactctatnnatccatggannncaacatcaggaggacctttgncattgtctggntgatccttgtacttgtccttcaacagctcccaaatcagaaggtcctcatgcattggccccctntttactcaacttggctccaaactctaatctgggcccctgtggctccccttcccctggnnatggatgcctaccttgctgtgccccaacccaatggctttaggaccaaattcttcaggaggnaaganaantaataggangaaaaggagccacaaagataaattccacatctcttttcacntttttacccacctggccattgaaattttcttgtttttttttgggg

SEQ ID NO: 4415 - DNA, 379 bp, Homo sapiens
  misc_feature 144, 275, 290: n = A,T,C or G
atttggagtttgttgctgaactgaattcatgatgaagatcctgcaatttggtgacctcctttttgatgctcactgcttatctgaatcttcaaaaccaggattgaccagatcggcctgtgacaactggtgcatggtggagagtanaacaactctgaagaagaggtcccaaaggaaactccagtcacttttgtaacttttctctgggaagccttgctggaaaattcatgtcattcattccaaggttgccaaaagcactacaattgattgatttccanaagaaaaatcagtanttattagctaactatgacaacaaatacttctgtgtatatctaatgtatttgaatgatttaaaataaagagttgaatctccaaaaaaaaa

SEQ ID NO: 4416 - DNA, 433 bp, Homo sapiens
  misc_feature 25, 29, 33, 40, 45, 58, 75, 77, 82, 86, 108, 115, 139, 179,207, 237, 265, 267, 279, 290, 302, 318, 320, 343, 405, 410: n = A,T,C or G
tggcttggagtggccattgggctcngatntttngcttcanccggnaaccttcgccttnaacccagttggcttggnantattngggncttggggaaattggctttccanaacatgnacttgaaaattctttctttggagngaacataatgggtgggagggggccggggccctaaatccantcttgtcattataaagaaagaagggaanttttgggacacaaaaaaggaagacaccagnggggcggtattgtaccacaagaagaaanangatcacgtgganggacacaagangagggtcttgcnaacccaaaggaaagangnagcctcaagaaagaaaaccaaanaccagcccaacccctttgatctttggactttgtaccttccagaattggggaagggaaattanatttnttgttttcaaagccaaaaaaaaa

SEQ ID NO: 4417 - DNA, 193 bp, Homo sapiens
  misc_feature 23, 26: n = A,T,C or G
gaaacatcattcatcaagattgnggngagaggacttactagtagagagcggttgatttcccaatacccggttaactcactctacaaagggttagcccaggcgcctcatattagaggcccctccaatacatgaatcattgatatcaattactaataaagaacttactttgcaccaggtaccacattaaaaaaaa

SEQ ID NO: 4418 - DNA, 358 bp, Homo sapiens
  misc_feature 102, 227, 229: n = A,T,C or G
tgtccctaggaatttgtgctctgtaatcctggagaattagcatcaccagatattacaactgggaaggaatctcatggatcaactcttcataaaatgctaagnggacccaaggaaagcacatcattaagcataatgataagcatgactttctgatcatggaccctatgaagtttctacaataaattggagaattgggatgagggttagccgttggttgttttgaaagnanaccacaattgaccttctaatatgtttcaaaaatgcttctgagtgtttaatgaagaagtgcaataccatcctcaacatgtagatatctatactactatgcttaatatatgtattgaagctgaaaaaaaaa

SEQ ID NO: 4419 - DNA, 111 bp, Homo sapiens
  misc_feature 25, 27, 36, 39, 51, 53, 65, 77, 89: n = A,T,C or G
ttacttcatatgatgaatagctcanantgaaggagntgnatttggtatctntnactacacaacanatcaccccccanacttggaggatnaaagcaacatgaatcaaaaaaa

SEQ ID NO: 4420 - DNA, 119 bp, Homo sapiens
  misc_feature 20, 52, 81, 94: n = A,T,C or G
aggctgatggacctccatgncagggcgattaccgatacgacaataaacaacnacacaatgtacagaatctatgagaagganatccatgacatgnataaaagtgaagcaggaaaggaaaa

SEQ ID NO: 4421 - DNA, 428 bp, Homo sapiens
gagttgggaagacaaaatgtttacttttccagaatgccagtagcaagaggtgaccacatgatctggttctagtcaatgaaaggcaagttggagtcactgggttatacttccaggaaatcttttatgaaaaggccagacctcattcacttgtatcctttggaatttttgctacttccccatttttttctgctgaatatgcaatcaagcaatcatgaggacatgacattcaatcatgaggctacaaaacctgagatgaaagtctttgcactccagtagggaagaaagaaggaaagaggcagccctcctagaacttcttgttactggaaatacataagccttttacttgttgttgtgggttgaatggtgacccccaagaaggcatttgtccgcttctggctctttcccagggccattaagaaccacttgaa

SEQ ID NO: 4422 - DNA, 265 bp, Homo sapiens
gcattaagtcaagaactgagcccagcatcggaaacaaacaagcagatgttcttgaacaggtgcgtggttacaattaatacggtagatctggataaatctctagagaattacactggatttacaaaaagccaataccaaaaggttacatatggttcaacatgtaacagcttatatccatccacggaagtatactctttgtgtttcctaaactagtctctgtactaatttgaaagctcaataaactcaactgagatccaaaaaaaaa

SEQ ID NO: 4423 - DNA, 187 bp, Homo sapiens
gtacaactgtattgctgcagaagactataatcaagacagagaaactcattctccacaatgggccttttcagaaggagagacaaggcattcctaatgcaactggatgagagacgcccaagaactccagatgtttctcttacaaatgtttttcttacaaattgaaaatgttacttttcaagacaaaaaa

SEQ ID NO: 4424 - DNA, 553 bp, Homo sapiens
agacttagaggagaggtgcccaggcagaaaacccattcatctgaggacctgtgacaaggaacaagaaagtggctgcttgagatgaagacaaagatcacaccaagttggggaagatgtcattgccaaaatttctggcatccaccaggagggcggagttgtccaaattacaaatcagaacaattgaaaatggaaagtctcaatcttgggctttaccccagctttgcccttgacttgtggtgtaactttacatggaacagcttatccctcactgagttagattggtaaatcccagtgcattgtattattcttatgtatagttggtaaatgagaagtcccaatgcattgtattattctcatttcttttcccaccatttggccaaaaatgttacaaccatcccaccttcagcaggaagactgttagaagtgactataaatcaggacagcctcctgactagcaatagtaaaagtcaagttacaccgaagcagaatcacacagtcactaatcggtgtcagaaaaaccacagatgtccttggaaataaaaccatgaaaaac

SEQ ID NO: 4425 - DNA, 365 bp, Homo sapiens
gcagtactgacagccatgatgtcaggtttgatgttgttcacctgctcttcaaactgaagcttaaagagaatagcactgagccgtggccgtagtctcttcacattgctcatctgattgaaaagaaaacagcagatttcctttaaaatgcatggtatagtttagtactgtacgactgcaagtaatctgggatgatttattggtatgacagtaccaaagaagaaatatgtctcctaaaactgatagcaggaagagagaaaagccctgcttgtttttgtaaggaatccagagtcatccctcaaaacccaaattaacaatttagatgctcaatgaaaagaaagctttaattaaatgataatgtttaatta

SEQ ID NO: 4426 - DNA, 174 bp, Homo sapiens
  misc_feature 16, 42, 55, 71, 74, 81, 82, 107, 115, 117, 125, 134, 138,140, 141, 155: n = A,T,C or G
aacattgcttaccganctatttttctatgacggcatccaatntccatgagatttnaggaatatcatattcnggncaatgannccctggccaggcaaagcggggactncttggccnancacgatanataactacnggtngnntgaacctttatganaagaatgcccaacaggtgc

SEQ ID NO: 4427 - DNA, 474 bp, Homo sapiens
  misc_feature 425: n = A,T,C or G
gtcagaaggaagtttgatgaagctcaccacgcaagactacatggttactgactggaatggccatcaggagggcagagagccactgcgcctctttctgctgagggttgtggatacagatgggaatttgaaaccttctttcctgtttgtgtgaaaaattcagactactggcaaattctaccctggaaactgactatgggtcaatgggagtccgctggcgaatggataccgcctgttctgtttccaattcatcaggaaccatgtggagaattaatatcctgcccgtccagaaggaagggagttattatggacagcaaagaggaaaggtagccaagttcaaatgttccccaagctgtggctgcttgaaaagtcaaacagtatgaagtataatggtaagtggggggaaaagaaaaactcacccagaatanaaaacgcaccttcaagggcttaagggacaaaagaaaacgctgctgtcct

SEQ ID NO: 4428 - DNA, 280 bp, Homo sapiens
ttttcatgttgctgatcttgatggtccacctttaagacctgctgtcacaggaactgtcatccacacacgggacacctgtacgtgctagaagacgtcgcactccggtaggcccagcagcctaagtagctggcagagggagggcaaggtctctgtgactgggggaggcagacatccagatgcttgtgagggttctgcctgccctgctgccatccccaattgtctccttcgggaaaccgtattttaaagaaagtaaaacagcctactccttttcaaaaaaaaa

SEQ ID NO: 4429 - DNA, 254 bp, Homo sapiens
  misc_feature 17, 20, 24, 27, 37, 50, 53, 57, 66, 118, 132, 141, 144, 146,162, 168, 178, 196, 200, 217, 219, 236: n = A,T,C or G
ccccccccccctggaanaangggntanaaaggggccncccttgttgtttnccnaaangacccaaanggttttaaactgggtttccttaaaaacttgaaaaattctgggatttggaaanaaggaccaaaccanttttaaaantcntnatattaccctgccccnaataanaattttcaanaaaaatattgttccctantttntttatttaccaccccanantctttattaaaactggngtttggcatttctttcaa

SEQ ID NO: 4430 - DNA, 248 bp, Homo sapiens
  misc_feature 20, 34, 40, 59, 65, 70, 72, 78, 79, 83, 86, 109, 110, 111,115, 121, 126, 131, 133, 135, 144, 204, 223, 231: n = A,T,C or G
atcagaccacatgctgtgtnaacaagtgttctgntgcttnaatgataatgggtctttgngcagantttgntnaacctnnattnccngattgggccaatggggatggaannntgcntgcttnccttncctcnantngaggctganccccagagcaacccttaagaagtcatcctgtatgctaatctgcaccttggagttggcttnccaaggaatcccacctgcnaaactgcnctattatgtatggacac

SEQ ID NO: 4431 - DNA, 148 bp, Homo sapiens
  misc_feature 16, 19, 34, 41, 48, 49, 71, 76, 81, 93, 94: n = A,T,C or G
aactgtgagaaatatnatntctgctatttctgcnctccaanctatacnngctatgttaaggaagcccaagntaatncaacncccacaaggccnnttatgtgcattcatatggaatatatgcaataatggcattatggtggattatgga

SEQ ID NO: 4432 - DNA, 134 bp, Homo sapiens
ggcacacttaacattttgttcaacaagtgtttgaaggataaaaatgattcctgcctacgtgaaaaaaatcgttccatcatcatttcctctgttttatgctttgaaataaaaattcttcccaacagcaaaaaaaa

SEQ ID NO: 4433 - DNA, 182 bp, Homo sapiens
gccctggtgtcaggagaacagttctgccagataaggacaatgagatgcattattatatagagtgactaagagccctacaagtactgttttagaatgtaatcccaggcagaaaggctgcggtaagagggcctaatattttgtggtaactatttccaaaagtaaatatattcgccaaaaaaaaa

SEQ ID NO: 4434 - DNA, 429 bp, Homo sapiens
  misc_feature 386, 396: n = A,T,C or G
gcaccctgcccgcccagtcgtcgggatcctggggagacagcactcccacctcatcctgccaccctgacagcatccagctccacccatcaggctattggcccatttctcatacatgggaacaccaggctggcccttcgcctgaaaccccattcgaggcagcacccgccctgctgcttctggccaggcaggcgagatctcaaaacatcgtgcttctaaaaatgctcttaagaagaaaaaagttggacagaagaatgtggaaacatttgctgtggtcatcagagtgacaggttggagtgaataaatgttcattatcctctttctgtatttttcatgtgcattacttttaaaatcagaagatgattatttttgcaatcagaaaaaaatgncattaagtgngataataaaaagccattttgttggtgccaaaaa

SEQ ID NO: 4435 - DNA, 433 bp, Homo sapiens
  misc_feature 19, 25, 41, 113, 213, 218, 348, 391, 409: n = A,T,C or G
gtgcaacaggaacctggancctcangagccgaggtgctcangaggggcagcatgactccagggctcggaaggagcccctcaggggaacctcaagagtgctgcctgagtaactntcattacacaaagacacaactgcaagaggatccccaggcattcccatgagaacacagattctgacaacccctccatcccccaccttggtctccaccccangactnacatcatggcaaaaatccaagggaagattcttgggtaactaatgctcctttacagggggtcccggatgaagggcagggggaaagtcttgtcactgtggggctaggatagatgaacccaagagtgatttgncaaacgtgcacatactcaaatcatttttcaaacattttggggnttggcaaaatgcatgttngctaacccccttttcccgcagtgg

SEQ ID NO: 4436 - DNA, 477 bp, Homo sapiens
  misc_feature 409, 433: n = A,T,C or G
gtgaaaagataatgagggaaaaaatgtcttgaaaattagctgcttctcggaatgcagaagaaaactctacgatttgaatatcatatgtgaaagagaaagaagaggttgtggtccctgacacagactgaagttcctccatcaggtttaccccatccttctggagcacgacgactgttttgttaagtgtgactcgccaaaagaccttgacatcttcaaaggccctgtgagcaagaaacccaccaatgccttaacagagggtgtcatccccatgtctaatagagtttattatcaaataatggtacctcttcatccaaagtataccaaatggtacctcttcatccaaagtatagcacttactttaccactgatgatgcagaaaatgaccaatttttctcacttcagataagangattaaagccctcaaggcttatgngggtttttttttgaaacccctccctttcaccatggaaaaaaaaa

SEQ ID NO: 4437 - DNA, 319 bp, Homo sapiens
  misc_feature 273: n = A,T,C or G
ggaagtcatccctggccaccaaccacagagtttctgtccaaacactgcatcctaggcaggctcccgagcctcccactccctccaccctctggaggagctcggggaacacagcctcattttcttggtctcctgagccaaagaagatcaggaggacaaagctgttgctgggaagagccatatacaataaagagactgcggagaatgtggaaaaatgaaaacagatgacttgctagaagtggtgggaggggaggtggtattctttcttttttctgntattgctttaatgttgcttgtacaataaaagtgtgaaaagcaaaaa

SEQ ID NO: 4438 - DNA, 280 bp, Homo sapiens
  misc_feature 109, 117, 161, 212, 235: n = A,T,C or G
ggggaagtgtgggcagagactcccacctgctaccaagaagaacgcactcagtcatgtaaggtctcgtggaacagacgagcttggtcagcagaatacggagaccctggcngaccccanaaaacctcaccggagcttgaattgcggacagcccccgtgggctncgcttaccgggagcaatttaagaggcaaacaaaacatgaaaaactactcanaattaacaatgggccagatggtnatgctagtttgcagcaataaaacatgataaatagccaaaaaaaaa

SEQ ID NO: 4439 - DNA, 274 bp, Homo sapiens
  misc_feature 27, 37, 47, 56, 61, 63, 87, 108, 110, 143, 151, 152, 166,168: n = A,T,C or G
cgacccgcaaggctgctgcccttctanattccacacngcacacaganatactggcnttacncngctggaggcctgtgctttgggatntagcgaaaaaaaaaggagcangntattcaagagccttccttttgctttactctacngtaaaatnnctatgctgggggtnanttccttctcatctgatgacttcttgagagctttttagtttctgcatctcctatttctaagccaatgcaataaaccagctggcagattatcccctttcaaaaaaaaa

SEQ ID NO: 4440 - DNA, 409 bp, Homo sapiens
  misc_feature 282, 371, 381, 392: n = A,T,C or G
ggatggcaagacagatgtctacagttttgggaacgctggcaagtttgaccacccacgtgcttcctgccccctcaacaccacgctctgcgactccagcctcacgcaaagattccttaccaacctcagacgacagttccttggtctctttgatgcccccattcttttttgtctgctttccatcttcatgaaaacacgacactccttcctgtctcctctaactccttttatcatccctttctctggctctttctcctcctcctgttcctaagagtaaagggctgnttcactttctgtactcgtactattacatactctctccttgggcgggctcgccctttcttctgggttcaacaatcacctttacatgaaangaagcaaccnacatttttttntttggtctctaccaagc

SEQ ID NO: 4441 - DNA, 104 bp, Homo sapiens
ggttgttatcgaagactgaatgaaatgcctcatatcaagcacttttcttggtgactggtccattacagtgagaaaataaaagaattttatccgaagcaaaaaaa

SEQ ID NO: 4442 - DNA, 225 bp, Homo sapiens
atgtggaaactcaaataaagagaggtgaaagagtccccaggacaacacaaaaaggtgacagagccactgaatttaaatccataccctctaattcaaggaaatgaaagaagagttttgaagagacagctgccctccatgctcacggcagcatcattcaaaacagctaagatgaagaaacaactaaaaaagtctgttgggaaatgaataaagaaatacaataaaaaa

SEQ ID NO: 4443 - DNA, 323 bp, Homo sapiens
  misc_feature 17, 25, 38, 96, 106, 111, 114, 131, 142, 169, 178, 181, 189,212, 221, 224, 227, 232, 240, 243, 246, 247, 251, 286, 288: n = A,T,C or G
aaacctacggaaagtgncccggcanggacgaagggggnaagaaagaagggaacctgaggcttgaccatagaaaccatgccttgaaccttcttaagnaaattgggcnttttncanaataccccaaccccttncccctctcccntgaagccctggtccttctccccttacnccttctttnttnaaggcttnccaccttcttggaaagtaccccntttccttgntgnctngcctntcacagtnctnggnnaagnctcttggtctcctttttccccaaccccaacttaancncccctccttattcctcttcttggtggtcgggccaa

SEQ ID NO: 4444 - DNA, 374 bp, Homo sapiens
  misc_feature 152, 288: n = A,T,C or G
tgatgacgcccaatggatacctgcacttgtgaagtccctgtctcatcgatctaagcgaagctatatgtgacttgctttggccagtggccattaccagatgagatgcccgcgtacacaggaaaagcccttttgaattggggcttggacattcntgctcttgataacactgctgccatgtagaagcctgggttagcccatctgaggacacgaccatgaagagcagacatgagccttcctagctgaggccacaagctgacacaccagctgattacagccacatgaagtganctcaggcaagtcaacaaagtgaactgacaaggcgggcttaactggaatcataggcaaataaatgattggtcttttaaatcaaaaaa

SEQ ID NO: 4445 - DNA, 148 bp, Homo sapiens
  misc_feature 16, 107, 120, 132: n = A,T,C or G
tcctggaaatggcttnaaaacatgactgaaatctccttgaggagcataatgcggagggttgggccctaatccaatctgtcattatatagaagaggaaatttggaccncataaagatgacnccaggggctgtnttgtacacatgagaaa

SEQ ID NO: 4446 - DNA, 169 bp, Homo sapiens
  misc_feature 35: n = A,T,C or G
tgacaagaactccagtgacaagaagaccagatgangaaagtgatgactcaagcccaaacccatcctactctgaccaataaagtaatgcctggagcagcactactgggaaggattctttatatcaaaagatataaaaacagaaatgatggtttctgaaggataaaaaaaa

SEQ ID NO: 4447 - DNA, 111 bp, Homo sapiens
aaatgcataaccccatctaactgcaacgaaacatccaaaaatcccaaatgaggaagattctacaaaatgtgtgaccgctgctgctgtcaaggccatcaagaaaaggaaaaa

SEQ ID NO: 4448 - DNA, 328 bp, Homo sapiens
  misc_feature 122, 298, 306, 307: n = A,T,C or G
gaggaacgagtaaaaccacggaagcatgaagatgtcttggttttgaaaacaccatggtgttaggaaaagaattgatcaggaaagttgaacagaagtctacatttctttcctgttaagtgcanaccttaacatatttaaaagttgacttgaggaagtcatgactatacataaaaaccatcctgtgatctttgaaagtccaagatcattccaagactgctgtcattttaataaatttttgcaaactggagaaggaactgcataaagggtgagcttgtaaagatcaagaaatgtatcaatnaacccaannatattctgagaagcaaaaaaa

SEQ ID NO: 4449 - DNA, 135 bp, Homo sapiens
  misc_feature 103: n = A,T,C or G
ggacacccagcccagcgtccgacccagacacaggctcggcaagtccagttcacacttgctcggcattccaggaacttacgcttcaacagccttttgcaaatgnaactaactgtgatcacttaatccaaaaaaaaa

SEQ ID NO: 4450 - DNA, 131 bp, Homo sapiens
  misc_feature 18, 28, 38, 39, 40, 43, 75, 94, 102: n = A,T,C or G
ctctgactatgcatcggngaggctgggnacctcctacnnnctnaaaataagttttttttattctaacaagaatgngtaacatttattatgattntacataangtgagcatctaaccattccgaaaaaaaaa

SEQ ID NO: 4451 - DNA, 385 bp, Homo sapiens
  misc_feature 358, 365: n = A,T,C or G
caatagataaacaaagcaatccccatctcatctggaccaaacctcttactcccaggcctggcagaccatctccacatctgtgacagcctgagttgctgcatgtctatgcaatttcactaaggcctgctgatccagcttcacctgaacttggggttaccacaacatctggctttggacagattggcatttgaactttctgagcaggaaacaaattgagagaaaactgggtgtacaaatattcattactttcatgctgtgttatgacctgtgtatgactctcctcgttcaatcctgggcctacattatatctgtgattctgctgagtcattgttgggaaatgaattcctacttgcgttgnctatcanccagtgagcacaaatccttt

SEQ ID NO: 4452 - DNA, 379 bp, Homo sapiens
gaatacgctttaaagaaatacttgtccgtgtgcatacacacatttgcgactgtgaaaggggaaagagaaaaagcagcaacctcaacacccatcgtcagaggaacaacatacatcccagcacacccaccttatgaagtatttatgcagccagaaggcttggaagccagatgaaacggcttactcagaattgtttgtcaatcagagtaaacagccctgaacactgctggaaaaagctgacctgtttgtgatggactctgactctgctgaacagactactttactatttctccactgttgagagtaaacaagattgcaggcagttgagttctgaatattatttgtgtgacagacctatacaaaagtttagtaaatcataaga

SEQ ID NO: 4453 - DNA, 218 bp, Homo sapiens
  misc_feature 19, 29, 39, 93, 95, 104, 114, 116, 118, 127, 145, 148, 149,157, 160, 166, 178, 202: n = A,T,C or G
caacccaaatgtttgctgnctataactanagattattgngagccatatttaacttatacaccatatggattccaaattaccacgtttttcatnantttttttgntttagggccngngnggccatttntacttggcttttaagcgnggnngaaggttnttnaaaaanggggggcctccnccccttttcccctttggtcttaanccaggtttgaaatttc

SEQ ID NO: 4454 - DNA, 357 bp, Homo sapiens
aataaagaaaaagatggctgaattggtccagcggtttcacttaacaagatgagaaagctgagacccagaggacaagacagaagaggacaagaaaagctcacacagcaactgatgcttgcttgcctcagggcatggagagggtgttccatcaaggcctccttctgcccagtgtatcctgaaggaaagaggagggactgcctcgaccccagcagggagaatggggttgccttgcactggaggcctgcggtgccctttccagcatctctccagcttatctgaaaaatactatttgggtttcgtttggggacctggaaactatgttggaaatagaggaactttagaaagccgaaaaaaaaa

SEQ ID NO: 4455 - DNA, 333 bp, Homo sapiens
gcacatggaggattgcacatggtgacttgcttggcagtgaaatgtgaactgaagttgtgcatgtcccttccaattggaagccttaggagccaatatgtgatctgctatattgccttttccctaactcaggaatgaatgttaccccagatggtgtgcaggatgcatcagcttggatccggattgaggagtcatggaacagaactgtaaactaacccatcataaacctctatcatgagcaaggacaaatctctgttgtcatagcctctgagactgtagcataacctcggatctgacatttctctttaattaaattaagtgttacatacaaaaaaa

SEQ ID NO: 4456 - DNA, 468 bp, Homo sapiens
  misc_feature 390, 395, 414: n = A,T,C or G
gaagacatatcaagcagagatgtagaaacctatctgcaaattgtttgatgctccttctatgagaaggtggagtctgtgtgccctttccttgcacctggcaggacctctgtgatcgtgtctttcttgcatgtggcaggacctctgagaacagaatgttgcagaagtgacactgtgtgagagacttcagagtcaggtttaaaaaaacttgaggcaatccctctgggagccttcagtcaccagttaccctgaggccaccacatggagagtgcttggagagaataaagagaagctcttggacatctcttgtgcaaacaacacttgtgtgtgaaacaagccccagctgttccagactccagctggtttttgtccttttcaatcgagaccccaganatggngaatgacaaagtctttaanatgaccctagacccagccaccatctgactgcaaccacatgagagactctgcaca

SEQ ID NO: 4457 - DNA, 425 bp, Homo sapiens
  misc_feature 57, 126, 145, 152, 154, 171, 198, 222, 229, 233, 245, 265,292, 298, 317, 323, 325, 331, 335, 336, 347, 363, 366, 369,380, 385: n = A,T,C or G
ggaaaagtccgaaaataaaatggaagaaaaaactgctgcagctttcaagcaaagtanagaatttcattaacacacagaaacaggaaacacaactaagttaagtaaagcatatggaaaataaattgnccaaaaagatggaacaaanggaaaancngatctggggtgaattanagacaatgcagaatgaatatcaatcangatttaaatcaattcatgactctntcagctncctnccaccaaattcngaaaacaaagatgggtttanaagaaatataaaagtacccgaaagganctaaangaaaatttacagccgcaangataananggaacntccnnggaagagatanaacccccttttcaagncantcnttttttttttncttcnccccccatggggaggtggattttggtttggaaaaaagttt

SEQ ID NO: 4458 - DNA, 148 bp, Homo sapiens
  misc_feature 30, 109: n = A,T,C or G
gaaattaactttgaaccttgggaaagggcnggaaaaccttgcaagttggaagcccgaagatccgccacccaattgccacttcccaagccttgggacaaaccaagaagtngaggaacttccattcttcaaaaaaaaaccaggaaaaatt

SEQ ID NO: 4459 - DNA, 298 bp, Homo sapiens
  misc_feature 159: n = A,T,C or G
gtagaagtgaacaacccaacccaatgtgactacttcaaaatgttgttgttatggatcagagacgagtatgagtcctaggaaaactgcaaagcattgtgtgagcatttctcaaatacttttccactgactcctaagatcctacaaaatggcaatgggtgntctgtggggaaattatgggttccacaatcctcccatccactcaaaaaaaaagtaggaaatcctgcataccttatatgcttcgttgagcttcacaggacctatttgcatattaaagtcattcagtgttttcaaaaaaaaa

SEQ ID NO: 4460 - DNA, 150 bp, Homo sapiens
  misc_feature 24, 32: n = A,T,C or G
agcgctggggagctgcctgcgttnagctacanctgagattggaaaagcattggaaaatttgtccaaagtcactcaacagattcatgatggatcctggattcacagccagctttacttggcaataaaattcaagtcctgttcaaaaaaaaa

SEQ ID NO: 4461 - DNA, 154 bp, Homo sapiens
  misc_feature 76, 79, 86, 103, 106: n = A,T,C or G
ggctctttctcacttggatggtccccagaaagtcagctgccatgtcacgaagtgccctgtgagaaggacctgtaancgngctggcnccctgatcatgggcttntanactctagtgaaaaataaatttctgtcgtttaagacactcaaaaaaaaa

SEQ ID NO: 4462 - DNA, 550 bp, Homo sapiens
  misc_feature 523: n = A,T,C or G
caacttcactaactgctcagcctcgtttagtgaagagagaaatggcaaattcaagccacagtgagctgccatttcacgcccatcagaaggacaacaaggaaaaatttggtcactatcaagagttgatgaggggggcccagctgagccctgcatgagacattcagcagaagacaccgcagaaagccaaggagtaacaagggaggaataaagggaccacattgaggacctgggcaggtcagaccccacctggcagtagccatcttgcctgcccacctgtcttgcctcctctgccttccaagttccagtttcatgtgcttccgatttgaggccctgcctccccatggtgatggacaacaggaagccagagccaggggatgacactgcccccttcaggctctccttaccgctgcaccagactccttccagggtggacaagctgccatggaaagaaagtaaccactggaaattcttttttagttctatttcaattctaggaacatttattgagtctacccggggtcangcactggaggcccggcggtgcataaga

SEQ ID NO: 4463 - DNA, 453 bp, Homo sapiens
  misc_feature 387: n = A,T,C or G
aatctgaacagacaacctcgcctccttactgaatcctaagctttcataaaaagacacagcccttgactccagggacctagctttcaccatgtaggccacttaagatgtcactgcctcaaaactccagaccttctctatatggatgctatgaagattaaatatgactgaggtttatacatccttaaaatatttatttattgggcctgtgaggcaggaaaatcctgttgatcccagatgatgccagagatcagtactccctgatgccctagctacactacgtgggggcaggtgagagatgagtaccaaccaccgctgctttaactgaaactagctcacttctacacaggcgacccttccgtataaagaggttttgcatccgcctactgnggattaaaaatatttcagggaaaagcaataaaaatagcaataaaacaatttgaaaataaaaaacct

SEQ ID NO: 4464 - DNA, 104 bp, Homo sapiens
  misc_feature 17, 39, 45, 46, 60, 82, 84, 88: n = A,T,C or G
cttggatagaaaaaccnataaaggccccctaagcccatnaaaaanngggcttacgggccnaccttccaagaaaggggggggncnaccnctgggggctcctgctt

SEQ ID NO: 4465 - DNA, 301 bp, Homo sapiens
gagtggctgtatgacatcgttttataaagtgatatggaagtatgaagtctgccaaaggatttttggaagagctattagtggtagactcaactggcaaggtccttattccttcttcctgcttcaaacgtgcaagtgagctatggagccgcagccagcatcttctgtccaatgacagagaggtcaagcctgctgcagagttgttggccctgacatttttagccacaaaatccatgccagtgattgccactaccatgtttcttgtcatgtgcaaagagtaaactcctactcacttaaaaaaaaa

SEQ ID NO: 4466 - DNA, 192 bp, Homo sapiens
  misc_feature 18, 23, 27, 28, 31, 42, 57, 69, 73, 99, 106, 110, 131, 139,174, 175: n = A,T,C or G
gagacccaccttgttttntaagnaaannccngggggcttctnttctggcctcctctntttcccttggcngttncaaaaccctgggtaatatttttgggngggcaancccntggcccgattttttaagaatntccacggnggttgaatcccgaaaatacctttgaaggaggtttnnttccccttgtttaaaac

SEQ ID NO: 4467 - DNA, 426 bp, Homo sapiens
ggctgatgctgggcaatccgaggaaagcttgttgttagcacatctactctgtttccttatggtctctgggtgtagtcctccaactagccatggcctgtcacaccaggctcctctcctgcccctgttccacactccatctcagcggtccctccagtggaagctcatgaagataatttgttggaataagaagaagaaaataaacaaacagatgctatctgcaaggcccacagcacatctgcgtggatgaagcagcagcactcaagtgtcctgggaaaggagtgatttgcatgtttgctatctggtgtgcaggagctcacacattcttttcaaaatgacactgcaatggcaacgttcggagattcaagttcttcaagttcaccttcagtccccgtgctagagaaatattcatgcttttaaaaataaaat

SEQ ID NO: 4468 - DNA, 121 bp, Homo sapiens
  misc_feature 36, 37, 38, 39, 41, 54, 57, 77, 80, 84, 88, 94: n = A,T,C or G
gatccgtgattttatgagtcaccattcgaactgaannnngnctcatatcaccanacnatgttattgctcctgcattnttntttngaancataanataaattttattcaacaaggaaaaaaa

SEQ ID NO: 4469 - DNA, 167 bp, Homo sapiens
gggcaagtttcttgttatcccaacaagtcttagctttggttcctcagacttgggcaatcaagatactcataatctaagaagaaccagtattgatgaaggatgagcaaggaaaaagggatgatatcatttaatctcaagaataaaaattgagcccactcaaaaaaaaa

SEQ ID NO: 4470 - DNA, 263 bp, Homo sapiens
  misc_feature 87, 92, 99, 100, 102, 107, 108, 113, 115, 120, 123, 124,127, 134, 141: n = A,T,C or G
aacgtgctggagtacatcatgttctggttagataacgggggactaaccagaacagactgactctgtccgaatcacccctggagacangaaantgttcannantttannccggnanggaanggnnaangggtggntcctggnggtgggagaactcagaactgccattcttctacctttctcctactttctttaatagaattttttctattattctgttctaaagaactcaaccaaattattgagtggatccaattaaaaccact

SEQ ID NO: 4471 - DNA, 156 bp, Homo sapiens
  misc_feature 18, 19, 45, 58, 61, 66, 95, 98, 102, 106, 112, 114, 115, 120: n = A,T,C or G
ctcttctaaatcatatanntggaaggcgtttctttttcaagcttntcagaccttaccncangccanaagcgttaccttgtgcaacattgctaatnttnatantgcncaaacncnnttttncaaaattgtttaattgaaagaaggccaggtaccatt

SEQ ID NO: 4472 - DNA, 160 bp, Homo sapiens
  misc_feature 108: n = A,T,C or G
cagagtcagctgctgaccctctccccaagaagatgaaagattcagtgacggatgtcttaaaatgggatccatcgtctgcgcagtggttgctgtcctctcatttgcagncagcgccagcactgtattcctgcattgcgaccattttacatcggctgttgct

SEQ ID NO: 4473 - DNA, 234 bp, Homo sapiens
  misc_feature 147, 149: n = A,T,C or G
ggctgtgagagccaggtatctccagtagctggcatcatgcctgagagaatgacaagtgaaagaagaagaaacaaggggatgtggggagagggaggaggaaaggattgttcccagggtccttccttctctgcggactccacacgcctnancctcaccagccgattctcctcatgccacctgtgtgccgggagatgctgtcagggctcatcaccaataaacaaatgaaaacaaaaa

SEQ ID NO: 4474 - DNA, 314 bp, Homo sapiens
  misc_feature 235: n = A,T,C or G
tgcagcccggagagctgtgagcaagtgccacaggaggaaatgactggtgagtgaaataagcaagataggagttgaagtgtacatgaagcagagtccaagccttctccttctggatgttcagctgggtcatcctgactgctcccactttcatcttggctttcaaaggcaagaggaaattataaggaatattctgagtggctttcatccaggagttctgtgggacccgcaacacctnatggtagatgcaaacagataaagaatattggtcaccaaaaggagttcttttcatcatagattctgaaggtagacccttt

SEQ ID NO: 4475 - DNA, 408 bp, Homo sapiens
  misc_feature 86, 349: n = A,T,C or G
gaatggactgaatggccatgataagatcaggcagtgaggatctttgtggcacccagcaaacaggagacatgcaatcatcatttttncaatcaatcccaaagtgactggactcaaagagggcctccacattccaattctagaattcctggaagatgcttcagcaagaactcataaaactttcacaattccaaagtcacacttctcatgaacgtgtgtacagttgaaggcaacgtcacatgcaagcccttctggcctctgtttcctcatctgcaaaatgaggcggacaagacttaattaactttgatgtcctgcaactacaaggtataatgtacagttgggtttttaaggntctcaaagttatttatgcaaacactgaatcagtaacatcgcaaactgcttaaaaaaaaa

SEQ ID NO: 4476 - DNA, 214 bp, Homo sapiens
  misc_feature 44, 74, 117, 120, 133, 142, 148, 149, 165, 166, 169, 179,183, 184: n = A,T,C or G
tgagattcatcaagctcccctggttctcaggcctctgcactcangcgagaattacatgtccaaatctctgggcnacctaaggccctcagtgactttgtgaagcaaccttttgagcangtncagcctggttaantccaatctnaatagnnctagctggccatttanntgnccgctatggncaanncttttgctttttaccctggaagaaaatact

SEQ ID NO: 4477 - DNA, 183 bp, Homo sapiens
  misc_feature 26, 33, 39, 69, 74, 81, 90, 94, 125, 126, 142, 143, 159: n = A,T,C or G
acattgaatgcaaccgactgctactnatcctgncatgangcagcttggagagaacaggcgcaggcccanatctnggctctncttccttgntaanatttgccctccaagggattcttaaggaatcnntccatgaaggaacccnnagaatgattatactgntgctgaattggaactccatgaata

SEQ ID NO: 4478 - DNA, 484 bp, Homo sapiens
  misc_feature 410, 437, 440: n = A,T,C or G
acgcagtcaactcacctgccagagttttgcttgccccaacacttagcaagaagctgaatgcatccaaggatccccacaatcccagaacattctaaaaatattgcaggatgagaaagaattgtcagcaactgagggaggaagttgttcaacttccaccaagcatcaggctgaggtggaatgagtggagacacatgatcaatgaataagaaagaaaatgagagagaagatggagaggattaagaaataatgattgaacacatcaccaccgctttgctggagcaagatcaaatacaatgggcaacgtgacaagcaaacaggaaatactgtggcgagtcgcctgctcccccaaggctgagtaggcctctgttgcatcaggggaagcagagtcaaatccgtgatttcagcttttnccaatggtgctttgcacacacaccaanctnaaaactacccccccctttgtcaacaaatggggcatggtcacccc

SEQ ID NO: 4479 - DNA, 165 bp, Homo sapiens
  misc_feature 16, 21, 32, 45, 52, 71, 73, 77, 90, 120, 125, 126, 141, 147: n = A,T,C or G
gaggatggggattggnttatnttgctcctatnctccctgcctganacctganctaccacctttacatcaangncccnaaaattgcctttnccggggcaaaaggacaatttttgggaaaanttcgnncattttttttgggcnccttgngcagggcttttgaagttt

SEQ ID NO: 4480 - DNA, 458 bp, Homo sapiens
  misc_feature 340, 343, 346, 348, 360, 402: n = A,T,C or G
gtacattttcttattttaaaaaataaggaaatgtcatcctttgctgtgcttgttacccttgatgagaagtgctcaacttcaaaatggatcattcactgataccatgatgaccaattaacatcactggccaccaaagagctgtggaagaaatctcactgcagagctgacttctatccctcccgacggtacatgaccctcctttatttcgactcagctgtcacctaagcctgtcagggatccaacagcatataccggtcacagcgcattgttgaataatactcctcaggaagtgtgcagatccaccttttccttcatcatttcagacaggggaacccacctnttnttnantaactggagccncgagtccagggccctaaatatcaacctatcagcacacgtagnggcacttaagtacatgctagattcttattgctccctgtccccaagatgcttatgaa

SEQ ID NO: 4481 - DNA, 196 bp, Homo sapiens
cagtgttaagaggttggaagacaagccccacaacttactactgttagaaccaaggatgccttctcaaaggaggggaggaagaagatcctgtttctggaaaaggagaaacggagggatctatccagtccttttggaatcaccagtagagcccactgcagaatcatcttattaaaagtgcctttcacctaaaaaaaaa

SEQ ID NO: 4482 - DNA, 292 bp, Homo sapiens
  misc_feature 155, 240, 250: n = A,T,C or G
taaaaatggagacttaaggaagaaagaagttttccccatgatggcatgaagaaaagccacacagtcctctggcgggaaccattagaggaagggactaacattgttctcccctgagtctcttctttgaggcagggagaagaccctggaacatctgnaggtgcagagaaatgccaccactggatcaagctgtttgtcctgtgatatggagaccactcaaacagctttacaattgtgtgctantcaagtgtanaatcaaaaccctttcctgtagcttttgtttgagaaaataaaa

SEQ ID NO: 4483 - DNA, 202 bp, Homo sapiens
  misc_feature 29, 32, 63, 64, 123, 134, 140, 165, 173: n = A,T,C or G
ccctttttggagcaaggttcagccctggnttnagtccaaagcttgaattgggcccttcgctgnnccatttaaaatgggcgcgccatttaaatggccgcttttggcccaaatatctttttgggntttttaccctngggaangaaaattaactttattaaagacccncctcttgntttatttttaccccccccaatttttttta

SEQ ID NO: 4484 - DNA, 452 bp, Homo sapiens
  misc_feature 374, 392, 411, 418, 426, 428: n = A,T,C or G
atatccattcctgttggctctgcctacgcgaggcccccgggatcggtctgccttgcaccaccttcgctgctctccggttcgaccaccgccttctcccagccggccctgctgcctcacccccacctccacaacctgttctcaggaggatggccagagcaacccctgtgccctcagccagctgtcttctgctcaagcctccccgcccccccatagtaaaaggcagagcctggaccatggcctgggaggctccgttctgtctgactctgccactacgtccggctccagcctctgcgcgcccacccgcccctgcctcgcccatcttggccgggctgtctcctgcagcggctccttcttgggaccttaagaggggctgnaacactttgaacttaaanaagcacaacgggaagcccnggacctntggcaagntnttttgggccaaatccaaccttaag

SEQ ID NO: 4485 - DNA, 247 bp, Homo sapiens
  misc_feature 21, 22, 24, 45, 61, 67, 82, 116, 143, 152, 172, 191, 200,215, 218: n = A,T,C or G
ccatgctactgaactgtgagnnantgatgtcttctgagctacccnaaaaatgaatttgggnggcctntccttgcccaacttncaagctttggatgagaccacagaccatgggatgnacctttgattgcagccttctgagagancctaagccncatacatttcaacttcaccntgctctaagtggtggcccncagataccntgagaaaattaatgntgncttaaactactggggttgggggcatttgc

SEQ ID NO: 4486 - DNA, 392 bp, Homo sapiens
gcctatgcaaagatgagaaacctgaacccttgaatcagaaagggagtcacaataccactaaaagtaaacaccattcacacagcaaagagccatggtgaagcaatgctaccttacccaaaactgtgaagtgccaaagttaagaagctgtttctccccatcaccaacacataataaatgttcagcaatggtgatactggatggtacctgctagagagcagacctcaagttccagaaaagcctttctgatatgatatacatcacaggaaacaagatgactggagctgtgggttacaaggaaggatatctaatactcttcagaaaagaaatcggtatctatgctgactaccttcttttattccctgtccataaaaatttggcaataatataaaaaa

SEQ ID NO: 4487 - DNA, 154 bp, Homo sapiens
  misc_feature 23, 51, 53, 69, 76, 98, 99, 108, 119, 120, 133: n = A,T,C or G
cctaaaaaagcccagtgtttttnttagccctccagctatgcatgctggacncnagcagagaagtactanatcagcntcatctgcatttcattcctttnngttttgcantaactacttannctataataaacanaccttgcgctcaagggagaat

SEQ ID NO: 4488 - DNA, 491 bp, Homo sapiens
  misc_feature 381, 384, 416, 419, 431, 434, 436, 473: n = A,T,C or G
gcccagaccgagccataattccagaaatggagtggacgagccaggccctgctgacagtggacatagtggactcagggaacctagtcgaaatcaccgttttcgggcggccccgtgtacagaatcgggtgaagagcatgctcctgtgcctggcatggtttcaccgagaacatcgtgcccgagctgagaagatgaaacaccttgagaagaacttgaaggcccatgcatcagacccccactctccccaggatcctgttgcttaagacaacatagttactgttgggaacatcttaactttctaacttttgctgctaaagttgaagaaaagcaagtatagcattcttaaatccccgtattcctttttcctgtgtcttgatggattgnggnttattttgttgcaagaagggaggttggacctnttntaataaagaaanggntnttttgccaaaagcattaagatcttcacacaccttatntaaagcaaatttataaaa

SEQ ID NO: 4489 - DNA, 162 bp, Homo sapiens
  misc_feature 38, 45, 75, 76, 77, 96, 104, 109, 116, 143, 144: n = A,T,C or G
acatgaggtaaagaaatcccccccagagccttcgaagngagcatngcccttgccaaaacttgatcttacacttcnnncctcctaactggggtcggnagtaattntctgngtgcgtnaagcagattactgcacgggcaacgggnnggtgggacttttgtcatt

SEQ ID NO: 4490 - DNA, 190 bp, Homo sapiens
  misc_feature 22, 23, 59, 72, 80, 81, 133, 135: n = A,T,C or G
ctctgactggcctgattgctgnngcccactgctctgatttctgtctacaagaatgtgantcctccaagaacnttataagnntggggtctttctgacgaaagaaaacctttcctgaaagggatgagtgtccttntntgaagagacacaggagagatgatcctgctttttggcacctttaggcttacgaaga

SEQ ID NO: 4491 - DNA, 141 bp, Homo sapiens
  misc_feature 30, 45, 54, 57, 61, 63, 65, 71, 72, 74: n = A,T,C or G
gtgaggatgcaaagagaaagtggctgcctncagccttcctgcagngaggtgganccnaacnantntatctnncnctttgaacttggacttcaaacctccagtattgtaagaaataaatatgttttcaaagtcaaaaaaaaa

SEQ ID NO: 4492 - DNA, 102 bp, Homo sapiens
  misc_feature 22, 37, 44, 64, 68, 82: n = A,T,C or G
agagaagaccgtctagacgtgnagaggctagaaggantatctcnctggggatttcataggaccncgtnagagttgacctcgngctttctacagaacgtggtt

SEQ ID NO: 4493 - DNA, 436 bp, Homo sapiens
  misc_feature 38, 398, 420: n = A,T,C or G
attgtgactgatttatgttcaagatcaaaggcaacganaactgtgaacaatctagtccttgatctacttctccataccaacagtcaacagtggaataagctctcaaagctcacttagcagcctgagaaaccaaactggcaattcgtcgagggacaactggtacctgcagatggactgttccaaatgtctcattaatttaggggggtaaagaattttcccgtttgaatatgggacagactagcatgttcttaggtggaatcatatgaaagaggatggccaggaagtcggggtccaagattctccccgcactgcttgaccacaatagctctggttttacctgttttctttggctagtctttaaaaagttgtcttgtaaaagggttaaatataacctaaanaccttattctggggctattccnaaaagaaccctccgtt

SEQ ID NO: 4494 - DNA, 108 bp, Homo sapiens
  misc_feature 36, 55, 60, 85: n = A,T,C or G
cttgggttcctgaatcaccatctgggaggctgccancattcaaagaacacctgcnctgcnttgtagaagagagaaagcaatcctnttactgtgtattagccaataata

SEQ ID NO: 4495 - DNA, 225 bp, Homo sapiens
  misc_feature 18, 19, 29, 43, 44, 49, 58, 79, 89, 95, 98, 104, 106, 108,125, 126, 147, 151, 162, 166, 168, 210: n = A,T,C or G
tggggtcaaaaggctatnntttgggccancccttgctttatannactgnaagaaagangcttattacctacctgccccnaggcatggangcttgnatnattttntncncctctaggatcaatganncacattatagaggtggctgtnacanggaccagtgtngcanantcttggccccagactaagcaaaaccatctggccctcgtaggnaatgaacccatatta

SEQ ID NO: 4496 - DNA, 455 bp, Homo sapiens
  misc_feature 396, 419: n = A,T,C or G
cctatacagcaagcaaacattgtggcgagaagttgccttagaacaatgagatgcgagcagaagacagctctgagtacggagggtccatctgctgtgctcatcagcagtcctggagggatacaaagtggtgccttctgtttgttcagtggatgcttctggctgatctatcaccgtggcaacatttggagcccaactcaaaacaagcacagactcattaactacaaactacattaacttagtgtctgttgctaatgagaaatgccgttcagaggtattttctactctagcatattacagttacctctctaaaaggtaccaaatgccactctcaatacatcacatactagataacatgaatgttaaaagaaagcaaaattattttaattaatgactacnaacagtaagaaatcatttcattnaaagggtactttgttttgccccttgggaaaaaaaaa

SEQ ID NO: 4497 - DNA, 355 bp, Homo sapiens
  misc_feature 332: n = A,T,C or G
ataaggaaacacgaagcacaaggatattaagaaacttcttcaaagttatactactggatacgactgaaatggattcaaccatagacagacacatttctgaatttctggtctcaaccaccacaccttgggttaggtatttacaaggttcaggtgttttgttgtaagacacatggtcaaacaatttatagggacaaggaagaatgggtcaggtgtggcttggtggaataagaaatcaaggtactgggaaagtcttaagataatgaaacatttatttaaggcaaactgctacaaagaacttagctaagaactggatatactgatgtgaataaagntttcgttgaatttacaaaaaaaa

SEQ ID NO: 4498 - DNA, 299 bp, Homo sapiens
  misc_feature 30, 73, 148, 150, 151, 159, 163, 172, 173, 184, 188, 190,192, 218, 225, 226, 235, 240, 241, 243, 248, 250, 277: n = A,T,C or G
cctataccatgataactgacagctccacancagtggtagagcccattcattccaaggaggactcagatgctangtgatcttcatcctgtctgccacttcgtgaggatagaaaactggagtctgctgagtctgctttctagatatgagncnnacccgaangaanacatcctgnnacctggcatgncctnancnaccttatcaaaatcgaaggaaccagngggcacnnattttttgngttgnnanaattngntacctctgtatttaaacctattccaanataatcaccattttccctttgg

SEQ ID NO: 4499 - DNA, 184 bp, Homo sapiens
  misc_feature 21, 27, 84, 88, 127, 141, 159: n = A,T,C or G
aacctggagggtccccgaacnaccttnaaaggggattattttacccccaaaaattcattcagccacaccctccttattggtaanggangaaaccaggcattctgggcggtttaggaaaaaaaacctnggaagaatcttcangaatattttaatggggangggccctggccctcaaaataagaaa

SEQ ID NO: 4500 - DNA, 205 bp, Homo sapiens
  misc_feature 30, 39, 42, 156, 166: n = A,T,C or G
cacacgtttgttagcctagcaaaagagttncacgcccangtntcccagggtggaaagaacaccaacccctggaccattcaaagaaagcttaccccgccctcccacttagaataagaagccaagggggaagaagaagtttcccggccatcctttaantaagggtaanaagacttatggcccggcaaggcccaagccatgaaagcca

SEQ ID NO: 4501 - DNA, 198 bp, Homo sapiens
  misc_feature 16, 48, 59, 69, 78, 84, 95, 102, 108, 116, 139, 152, 164,165, 169, 172: n = A,T,C or G
ggagttaccgggcggnaggcaccacgccctgggcaatcacagactttnctttatccttnattatacagntttaagctnagctcngaaccagcgantgttganttactnggctgaanagaaacgtgagttcacattagangaaaggtatttancgccttattaanntganagnaactctattaaagattaatcacgttg

SEQ ID NO: 4502 - DNA, 361 bp, Homo sapiens
  misc_feature 39, 109, 233, 271: n = A,T,C or G
gccgactgttctttggtgtaataatatggagctggttgngtgtacctggagagaatcgtctgtggatttctgagctcgaaagctgcctggacggattcaagaggtgacngtgcacagctatgtcttgggggctgagcccaaggggcctgaccggtgccttctgcgctgccatgctgccctcatagtggcttctgggacaccgtcagccctgtgctccccagagcctgcatcanaacttctcgaacttttctgctgaagtgtccctaagaanagcaaatgcctgcccctgagccatagataggaaatttcttttaagtcccttgttctatcttaaaaattcatgtgaattgtgaaaaaaaaa

SEQ ID NO: 4503 - DNA, 282 bp, Homo sapiens
  misc_feature 16, 75, 80, 100, 149, 151, 169, 172, 177, 179, 219, 236,238, 246, 249, 257: n = A,T,C or G
tgggactcctggaatnaaaaccatttcaaagagccactaccaatttttttttttaaacaaaagcatcaagcctcngattnggcgctgataaaatctctgngcagaactggtccaggcccggaacacaggaagggaagtaggacccaccntngaggagttggctgtcttnctngggangnagaatgtgtagaacaaggcccactgggatttgcccccccnccagaaaaattagcccntnggaacaanaanggagcttnttccccacttacccggaatgcaggc

SEQ ID NO: 4504 - DNA, 205 bp, Homo sapiens
  misc_feature 49, 60, 69, 77, 78, 88, 91, 99, 101, 104, 106, 115, 127,131, 132, 133, 134, 137: n = A,T,C or G
cttgttgatcggaaccagctcctgacagaccccacctacttatatatgngctctgagtanatctgtccnttgaatannatgcggaggntcnacacctgnantantnaagcccttnattaccttagcntgcnnnntgngaactggcataatcactggctgcttctgcacaactggaaggggggctctacctgtggggacgcaccct

SEQ ID NO: 4505 - DNA, 210 bp, Homo sapiens
  misc_feature 22, 26, 31, 44, 49, 84, 89, 104, 121, 152, 153, 163, 165,166, 168, 172, 180, 185, 194: n = A,T,C or G
accaaccaataccaccctcctncaangcctnttcctcctcatanacctntcttactcacatattattttataactccaaactgnctttnttttattttcccctncatgctcatatcacaanatgacactgttatcacattttttcatcagcnnataccctgtnannancctnatattttntcgtncactttatnaaaccaactcactttc

SEQ ID NO: 4506 - DNA, 535 bp, Homo sapiens
  misc_feature 345, 434, 463, 486, 493, 506: n = A,T,C or G
actgtctcatcctcctctgcaaatccaacagaaaggacacagtagagtgggcaagaatgcaaagaaggtctgtggtttggaactggcccaagccgaactaaacttttctaaatatacattaaactgtcaacaaagagcaccgtgacccacagcctgaataaagggagagccccaaggccctctgaagccactagttctgtgagttgttttagggagaagacagacaaccaagaattatttaccttattagactgtgcccatccaagcccaggtaaaaccttttgatcagcagaaaactggaattatttccctttctctatcctggattgagtgtgaattccccanaaaaacttggctttgagagcactagctggacatataggggtccattttcaatctgctctgaaaaaggccctgcttcattctaaaagaangctttaaaaaactggtatctaagatctangattgaagatggggagaacctgngggtgancaattggccccantctttctgaagcattatctgaaaaaaaaa

SEQ ID NO: 4507 - DNA, 141 bp, Homo sapiens
  misc_feature 23, 30, 32, 36, 45, 51, 55, 57, 60, 88, 95, 96: n = A,T,C or G
gtttagacctggggatctacctncttaaancnaaantgataaacngaactnactntnttnaactctgacatgcgccaacaactaccangaatgannaagtatatttcaaataaactttcctattaaagtgaaaaaaaaaaa

SEQ ID NO: 4508 - DNA, 355 bp, Homo sapiens
  misc_feature 323, 337: n = A,T,C or G
atgctcacatcattccatcttcaatcaagtgaatagcaggtggcatttttatgtggctgaaagagaagactaaatcagccaagaagtggggaaactgcccagatggatcatacaaccatgtctatgatcttcctgtttctctgggattctgatatgaggtacgtttctccgcttttctgttttctagaaaattagaattttctataaaatttctatggaaaccatattttccattaagttaggagcctcagtcatcctttgccccactgaagctttgcaggagggagccccagtcgtaggtgcgcctcaaactccttcctcanccataagcactttnacccccccggggccgtaa

SEQ ID NO: 4509 - DNA, 206 bp, Homo sapiens
  misc_feature 16, 45, 190: n = A,T,C or G
acgggcttccacccanaagagctcagagcctgcccctcagggctngccaagtgagggtccctggtgatgtctgatgtcctcgtctgcctgggaaggacccagctctcctcgctcagctctagaaggatctatctagttccttgacttagtaaccttctaattgtaccattaaaacaccaccacaaccaanaaggaaataaaaaaaa

SEQ ID NO: 4510 - DNA, 196 bp, Homo sapiens
  misc_feature 111, 134, 138, 146, 152, 160: n = A,T,C or G
caactggatcataacagtcatgcaatgatacatcaggaccctcgacctcacaacattttgtctaccatatgcttaaaagaagagctaaaattctataagggcgagaaaganccttcaccattcaccttaccggntacntccttttngggatnttttaaangtgggttgcctctcttttaaaaaagaaagagaaccc

SEQ ID NO: 4511 - DNA, 475 bp, Homo sapiens
  misc_feature 109, 146, 177, 178, 254, 265, 307, 354, 405, 415, 417, 427,435, 437, 442: n = A,T,C or G
ggtccttccataagcttgcatcgtcgttattcatatagtaatcgcccacactatatctagcgatagatttgcatcgtctttttctaatgagcacttccactatcatatngacccacgttgtcgtcatatcgaagtcgtgaactccnattccatcgagacgacgcaacccccagaganntgtaatattcaaaaaacattgagacgtgctatttcctcgtagttcgaatggctagcgacggccccccatttacacnggagtgtagancgtagtatcttgccaatctatcaatagggaaacccagtcggngtacaagaacatgccccctaaggtcgcactctattcaaatacatgcntggatacaacaaactaccaagacggaacatcgggggtagggcatgccactnttgaatcttntntaacgggccntaatgcgncnccctnggaagatataaatacaccttttaaaaaaaaaaa

SEQ ID NO: 4512 - DNA, 204 bp, Homo sapiens
  misc_feature 28, 29, 33, 49, 64, 78, 132, 147: n = A,T,C or G
gcttataggtggaagggacttgccttgnntcangcaatttgaaagtaancagattgtgtctaangacataagaattgntttcaagcatccaaatgaaacagtgggaggtgcacagaatattgatttgtatanagttgacttacgttngtggatttttcattcaataaaaacaggttttttttttttaccagccaaaaaaaaaaa

SEQ ID NO: 4513 - DNA, 529 bp, Homo sapiens
  misc_feature 17, 57, 147, 204, 242, 252, 283, 327, 337, 367, 384, 439,454, 476, 500: n = A,T,C or G
attaaagtcagaaactngaagctttcttggaaggaacaaaattccccttcaacaatnttggaagccccctcttggaagaatggcctggccccttggctttctttaataaacttccccttggcctaagggccatggaatggtggcaanggccaggcccctttcggccccaacccttggccccaacaacccctttccccggccccnaagggggtttccttcaacccatggcaatcttcaacttngcggaatctngggggaatccccttccccaacttcccttccnacccttcccatccccaacttggaaatcaaagcgggtcggcccgnaatcaagggnaagccttggaagaaccctggaagaaaaggnccttggtaattaaaagnaaaggccaggaacccaaccttcccccgccggaatttcttggcttggcccccaacntggaaaacctggggnaggaaaattcaattttggaagnttccggggcttgggaattccttcnttaaaaccccaaccccggaaccttccaag

SEQ ID NO: 4514 - DNA, 172 bp, Homo sapiens
agtcccaggacagcctgggaagtgttggctgcctggtaatggaagaatgtccaggatggaaaacaagaggctggatctgcaaatgacattgtatttcaggggtctgctttcctggtctgcccctccccacctctgtagctccctcacagtgacagcagagctgtgaacccaa

SEQ ID NO: 4515 - DNA, 271 bp, Homo sapiens
atttgcattacaagaaagactgacggattttaaaccacacctaaaagaaaagaagtggtggcgaataaattgtagactctcccaactcatcatgtagatatattatacaagcaaattactagcagtcttggagaatattcaatgaatgcctttacatgtttgtaagcaaatataaattgtatcagaatgttgagagattgtaattagtggaaataactagctgaaataaaattttaaataacgtgtttctaagaagttaaacaataaaaaa

SEQ ID NO: 4516 - DNA, 500 bp, Homo sapiens
gaatatagtttccactgtaaacctggcctgtaagttggatctgaagaaaatagctttgcatgcaaaaaatgcagaatataacccaaagaggtttgctgctgtcataatgaggatccgagagcccaggacaacagcccttatatttagctctgggaagatggtctgcacgggagccaaaagttacgagcctgaactgtttcctggtcttatttatagaatggtaaaaccacgaattgtgttgcttatctttgtatctggaaaagttgtgttgacaggtgccaaagaacgttctgagatctatgaagcatttgaaaacatctatcctattctaaaaggttttaaaaaagcctgagcatatcattcagcatctcacattattctggtttgaatatgtccataagcccagcacagaaacagctggattcttctacgtttaattgtagatgttacaagtacgttacttattaaagggcgactctgtgtaaagtaacctaagaaac

SEQ ID NO: 4517 - DNA, 148 bp, Homo sapiens
gtgaagaatttgctgaaactggacgcatccgtcttcaatgaccctcttaaatccgggcatggggtgaacacaaaggcatctgtctaatatcctggcacaatagacacacaccccacaattaaaaaccccggacgcgcaaaaaaaaaaa

SEQ ID NO: 4518 - DNA, 392 bp, Homo sapiens
  misc_feature 94, 96, 101: n = A,T,C or G
acactgtgtccctaggatgttccttgttcggaatccagcctcatcagccatcccacggcccgacagaagcatcctgacatcatcaatccacaananaccanacgtctgctgagcccagaatgaatcagacaagagaaaggttaggcggccagggggagctaaaagcccctaaaagtttaaagagatcctaccaaatgggtggttggctcccacagagattagttttaatcaattattaagcaatagtttaatattttaagagtctgctcaatcacagagaaatgaaaacatttcatgacttttttccctacatcttccaaagcaaaaaatgtaaagcaagtgtacctccagtgacacatttttaaaaaattctttctattgaaaaaaaaaaa

SEQ ID NO: 4519 - DNA, 152 bp, Homo sapiens
  misc_feature 24, 26, 29, 32, 48, 55, 56, 73, 78, 91, 99, 123, 125: n = A,T,C or G
acaggtattgtcatggacaaggantnccnaanctactttgagatactngctgctnnccccaaagggggcgatnactgnctggaaacacacnatcacccncaaggaggcttgggcgctgtaacngnccggtcacccctccctgaaagggagga

SEQ ID NO: 4520 - DNA, 395 bp, Homo sapiens
cactcgtgctgatgaagatggggggcagagtagtcacaaagaatgcagtgtgagtcaaccctggcatctggaaggatctgaactggctgactggagtgaaaagaattcttcatgtctgtaaattattacgaaatgccctgaggagcccagtgactagtcactgagtatcaaacccaggaaagaccacgaaccagcataagttctagatcaaacattgtggtctgtacaagccacacttctaacacatctaggttcaatctgccttcagaggtgccagtggaattcaaaagcatgttatagcacttttcattttccagtgctcctgattatgaaagctcacacatggccattctcctctctgaacatctctgcaaataaaatattattcctatttt

SEQ ID NO: 4521 - DNA, 421 bp, Homo sapiens
acacccagttcaggtactccgatcataaaatgtgagttctgaagaactgtctagagaaccaatagccactaaaagacaccttaataaagttgaaaaattcatgacagtctcaaaaaagcacagcagggtccttacagtagatgaagatcgcccagcaaaatgtagaagccagctgcttttctggaaataaaaaatggcatcagctttggcagacagtagtgagatccatcacttcctaggacccccaaacaatcttctgaccaaggtctggagaagggtggtcactgagcagcaccataaacagaccacaaaagcgtaccaccaaaggtacaagaggattttcaaatggcgaattatttctacatgcataacaaaccaggctccaaacctcccgtgaaaggactgcctgccctgttttttt

SEQ ID NO: 4522 - DNA, 386 bp, Homo sapiens
  misc_feature 44, 245, 338, 366: n = A,T,C or G
actgagtgggaggccatgagagccggaattctcacgagcagcangcggccctgtggccctcagcagagggactgactggaagcagatgtggcacaagtctccccatgcggcttcactgttgactctcaggacatctaccctggggacttcccgcaccaagaagaccctgagtcacatgcttgctgctgtccccatctatgatggctgtaaattccatttgcctgctgctgaccatgaatggaagnctacctgggaccctctcctgacctggagacccacacatccaaatgcctacttggcagctcccgtggatgtttcgtgatcagcattcccaacantgaaatcctgaatgctcttccccaaatncactccacacacggccttcc

SEQ ID NO: 4523 - DNA, 460 bp, Homo sapiens
  misc_feature 32, 378, 385, 389, 392, 395, 401, 412, 429, 435: n = A,T,C or G
gatgaagacctggatccttgaaattgcctgcnagacccttttggatctggctcctgcctacctctccagcccagcttcaagtcctctattctgccctgccctaatcctgggcttccggagccttctttcaggacccaaaccctccatactccttccatctcaagcccaacatagacccttcttcaccagcctcactcctcttccatctgctcacttcttctcctctgatggcccatccccaagaagcccccatgaccccaaagagggttacaccacgtatattcccccagctctcactctcttccccaatgatgaaacaccattataatggaaagatcaattgcatcttaaggactgggtatctgccttcccgactanatctcangctntanganggtaanggcagggccantttgccgggtttttctnaaaaanggcccccaaaatttgggtaaaaggc

SEQ ID NO: 4524 - DNA, 198 bp, Homo sapiens
tcagggccggctgaactggcagatgcagacctgtgaacacaaagggccaactgtccatctcttacatgctttgtggaatggaggtttattcggactgagtatattcatacatgtgatgccgaatttctgaaagaagttctacgtggggtcattcagtcccctgaaatcctattctaagtctggctcacttcaaaatcc

SEQ ID NO: 4525 - DNA, 181 bp, Homo sapiens
  misc_feature 28, 130: n = A,T,C or G
ctgacacagacagaaagaagaagacaangacctacatctcttcgaggaaacaattagtgattaggcctctattgctgatttgtatctgaatcgggtgaagaatgtagggaagataatttgtctcattggnttttctgtttttaaatttttattaaaacactcaatgatttaaaaaaaaaaa

SEQ ID NO: 4526 - DNA, 295 bp, Homo sapiens
atcactgaccctgggagaaggcaactgccatgtcatgaggatacacaagcagcactctggagagatttacgtggtgagaaaccgaagcctccagctaaaagccacatggatgagcttagaagaagattcctccgatcgcagtcaagtctttagatgactacaatcctggacaacatcttgattgtaatctcatcaaggactgtgagcctgaacatctagctaagatgctcctcaattcttgactctcccaaactgggataataaatgttggttgttttaagtcaaacaaaaaaaa

SEQ ID NO: 4527 - DNA, 258 bp, Homo sapiens
aggctgacccatcaagtggaatcctgtggccaagaagcagctccggcagaaagtcagagagagaggagagtgaggataagcttaatctttgaaacaattaactttgtacctctggctgctgcagctgctagttacttgaccccgagtgtcatacccaaccacaaagcctctctgcttgaagtctgagaaacatctctcaaggtatttgtacatcccctgaagcaaataaacacaaaagattagttctaaaaaaaaaaa

SEQ ID NO: 4528 - DNA, 387 bp, Homo sapiens
acgtaagctgatgttacttggagatccccagccacagacatgacattgcaaatgggattctgaaagttcaatgatttctacaaatcagcacacaaaagactgaaatggtctttcactctggaagaggagtttaaacacacatatacacaaacatagaaacatacactcacaaaagcaggtgggagacagagcagagagacagcctgcactgagcagatggagcagtgaacatggacttggtgagaactagaatgcaaataaacttcatctatcttccatgtcaactatgttcaactggtagtgactgcttgaagcattgtgttaagaaagattctgaggtcacattctagctcagaataaaaaagtctcataatgaaaaaacaaaaa

SEQ ID NO: 4529 - DNA, 542 bp, Homo sapiens
  misc_feature 516: n = A,T,C or G
gtcatcactatttgaactaccgtggaggaagagagacgtgctagaagagacttggagaactgcaactcataagaaggttcctgtggacagcgatggacactctaaccacccacagtcctagcccattggaggatgttttagcacttctttctccacatatgatcacagtgaaattggaggaaccaaattttaccctcagaaggcctcattcctacttccccaaagtaaattagctatttgaattttcatcctttctacataaaaactgtgctgtatctccacctactttttcttcacttcctcctccctttaagaaaaaagactgttttccttgactggacttactcctgggctgatcacctccacctgcatcctccagaacttgcttaatcatctgtaagttcttcatttccactgaatccttctcttctgcctacatataggctcagttctccataaaaataccattaacaacaactggaagagaattttgatcaatcccaacaccctttcaanggatcttggaatggtcctttggtccc

SEQ ID NO: 4530 - DNA, 303 bp, Homo sapiens
gtttcacttggtctggacatgcgatttgctttggctgaggtatatttgtggaactactatgcccatttcaaggctgggctttaggaagttttacgggtttccacctattttcctgtgccttttccattctgtcaagaacaaaagctgatgctctaaggtggatgagagaacttttcaagcagaagctcccccagccgtcagtgcctatatctaaccaccttcctaatgtacaaatttgctgaaacacagctgacacacagatccttgagaataaatgctcatttttatacaccaaaaaaaaaa

SEQ ID NO: 4531 - DNA, 358 bp, Homo sapiens
  misc_feature 170, 226, 260, 290, 300, 310, 321, 343: n = A,T,C or G
ctccccacgcacgctgcatgacaagaagcagcagctgaaagttttgtcttcagaattgaatatgtatgaagtacagagcaaagaatataaatatgaggtagagaaacttaccaatgagctccagaatttaaagaagaaatacctcgctcagaaacgtaaagaacaacttnaaaaaaacaaggacacagcacccatggataacaccttcttaatggtcaaaccaaangggcctggttttactgggggcggattttcctctnaggtcaaccataatgacgttctaacctgangcttgctggntgtttccagntgaaacaactnatgaaatctgctcttgggaccnttttgggggaaatct

SEQ ID NO: 4532 - DNA, 342 bp, Homo sapiens
ctcaagatcaagcacaaaccaccatgggagcagccacgtctttctttctttgtccctagagcatgggaagagaaagttacccaagcccagcatgtgagctctgcattcctcgcaatgctagcaggaggggcttccagcgtctctacgcaagacaacaggtgaggacatctgcaaaagcctcttgaatctctaggcatactgttgggtcttgctgctagggttacctgcaaatgagcattcatgcttatgtatttccttctcaacacaagttggaaaagcaagggcacatcactttggggagccataaaatattttaaaactacacactcagtattaaatgac

SEQ ID NO: 4533 - DNA, 413 bp, Homo sapiens
  misc_feature 193: n = A,T,C or G
gttcacggtcaattgtaaagtccggtctagagagggagaaggacccatagttgcatcataagcaaatccaatgaaggagaccaaaaaacccagaaccagcagaaaagagacccaacaaagaaatgactgttggtgcaagtggaagaagccggcctcacatctccaattatctttgacaatgtgacgttcttcnagcacattatgatcattgaagcataaaatgatgattctgaataacacaagtgaatagttatagtaaagagattctgtttaagaaaacagggaggtaaaattttagggggacacaggttctatcaaaatttaaatttagtttttaatttgtaaacttacaaacaggcatttaatttttaaaaaaagtctgctaatataaactttatttcataaaaaaaaaa

SEQ ID NO: 4534 - DNA, 375 bp, Homo sapiens
  misc_feature 253, 294, 355: n = A,T,C or G
gtaactgaacattagagagaatctgcactagtggaaacctttctcagctcatgcttagctagaactcccggaaggtatgtgagaaattttaaatctctgattctggagcccacaaagaagctcaggatttcaactgtcaatgcagcaaattctggaagtccatatggaggtgcctaagattttggtgaatagacggcattcatataaatggctggtgtagctcgctggaatgcttggaaacaatgggcgaggntttaaaaggatttggagtaactcgaagttctggtgagaggnatgctcgttaaaggaatttttttatagctcctagcctctgggatcaaggataaaacaatgnttttcttggaaaaaaaaaaa

SEQ ID NO: 4535 - DNA, 369 bp, Homo sapiens
gctgtctagaaaaggacaccaacaatcacccatgaagattgcccttcaacctttgggaggaaatgatcaaaatgggagctagagaagattgttgttggaatctcaggaaaaagtcataatccaggccaaagtgagcaaactcccaagagcattcctggtcagcaccgcagcaaatccgtggcaagtgcagagattataagcaatttctccatggctggaattcagttgatctgggactgaacctatttctaatgggctgatgtcaagatgcctgcagcagtaccacgcatcacatccagtgctgggaacatgccaataaaaaagggatccattctcccgtttgctaggtggcaagcatgggtaaatgca

SEQ ID NO: 4536 - DNA, 299 bp, Homo sapiens
  misc_feature 141, 152: n = A,T,C or G
ttgggccctaaattgcattccaaagaccctgctcctggaacagccttctgcaatcaacacaacctcttggaggttttactgcgtctggcactcgcaggttcccctgctctcactctctctctctctctgtttccttgctgngaaaaacgtgntgaccatcaggcatatggcagaataattggatttcaggcaagccaatataaggagagtgaagttgaaaggttaagtcatgtgcccaaaatcacagagctgagattggaacacatatctgcccgatccgaaagttcgaaaaaaaaaaa

SEQ ID NO: 4537 - DNA, 145 bp, Homo sapiens
  misc_feature 31, 37, 46, 60, 86, 92, 129: n = A,T,C or G
ggggggccatttccagaataaaggccattcnttattnccccttggnggaaccctgggacnggtaccaccaatcccaggaatggggnccgggnttccttggcctttaaacttggaatggaacatttttcncccacaaaaaaagaaa

SEQ ID NO: 4538 - DNA, 184 bp, Homo sapiens
  misc_feature 83, 153: n = A,T,C or G
gcaaacaacgggggccttcccatttggtggaaataaccgcccttgcgcccgtaaaaaagaacaagggcccccggaaacccaanggggggaactttaccggaattttcccaagaaaagaaacggggccgggggacccaccggttccttttttgngggggccatttcaattttcgggttcaaaaaa

SEQ ID NO: 4539 - DNA, 315 bp, Homo sapiens
gtcatcactatttgaactaccgtggaggaagagagacgtgctagaagagacttggagaactgcaactcataagaaggtaccaaaaaatgtcagcgcactagcagaagagagcacaaaagctagcctgcaagcagccaagggctctatctgtggtctgtgttttaacggcagtaccaatgatgatgtgacctccttatgaaatttcctctcctaggactacccacgcctgccccgtctcttccttgcaggtcgattccttacttattgttaagtctgaataaaaatataacaaacttatagataccaaaaaaaaaa

SEQ ID NO: 4540 - DNA, 355 bp, Homo sapiens
  misc_feature 257, 265, 302: n = A,T,C or G
catttgttaaaaacgtaccctacaccagacaacatgctagctgctgagacagtgaagacaaaaccaaagacagagaggcgagccaacaattttataccacagtccttcacacacctccccctccatctccagcctgctgaaacacagacacagaagggagactgaagaagtcctgtgcaaacagaagtttaaataaagctaagcagttcagacaagagctaatccaaaccatcacagggatgcatttgtgtggcggncagatcanagccaacactaacatcctcagctcccttgaattctgngaattctgtctgcagaatgtgcttacaaggctgggagacatcggcctgcttca

SEQ ID NO: 4541 - DNA, 193 bp, Homo sapiens
  misc_feature 52, 74, 81, 83, 107, 110, 111, 113, 123, 147: n = A,T,C or G
ttaggagcaagttcagcctaggttaagtccaagctgaattggcctcgctgtncatttaaatggccgcgcccttnaggaatngngtatccggcgcgcaacataaactnaanncnatgagggcancttttggtttttaccctgggaagnaaatactcataagccacctctgttatttacccccaatcttcacaag

SEQ ID NO: 4542 - DNA, 325 bp, Homo sapiens
aaaaactgtgatttctgtggtggcttgtcccctcacttgcttttggagtccttctttgtcagctcagacctggttcctggctgagcctccaggcacctatggaacaaaaaggactcatttgacgtaagggccagtaagaggcagctctggaatctggatgtgaagctgggtagcactctcgaatgatgtagcacccacagactcaactccagagaatgtcacactccacagaggcaccgaaaaagaaatcccatcctgggcctgtccaaaaatcccaaacagtctttgacagggaaaaactcttgtatggggggggaaagggctt

SEQ ID NO: 4543 - DNA, 497 bp, Homo sapiens
  misc_feature 460: n = A,T,C or G
aaattaccgcctgccagttcctgcagatctgggccactgcctcgtcactgagacctgccatgcggttttggggcctgcatctgtgaccgtgcttaccatggcattgctgccaggggccactgtttgaactgtcgtgggctaacgagaaaaagcaaaggccaccagataagcagaagatgctgtgagccaggccaagggggtgttgtgacatcattgtccctaagcactggcgaaatcaaatggtctcagcagaagaagggggcgggtagctgagtcacgccttggccaggcaaacttgcatggacgtccctgttgccctgagaacccctccacaagagcagcagagattgagttttacggaaacaatgtcacctgtgtccttgtcaagtgttgttcattttaattgtattggttttgccgtctatgggcttggtttgtaaatttgctttggttttattgnatgagctgtagttggaaggaattttatatcccgcctg

SEQ ID NO: 4544 - DNA, 355 bp, Homo sapiens
  misc_feature 19, 41, 46, 74, 106, 120, 135, 173, 199, 251, 283, 293, 304,321: n = A,T,C or G
gtcatcgaaaccctaactnaagatactgcttccttcctcanctagnacaagggacatgcacctacatgtctatngttcaagaagctggccttggatagccaccatngccggggcaggctngacaacaccgcttgnaagagcatcgaccacctagctcaagccaagcagatctnaccacgttgtataggggatcggaagnaggttgggtgccaccaaacattaccccccaagcctccctttgcctctcaagntttagggcattaaaattccttgcacacaaagnggtgggttgntcaccttaatnggcttatctgtccttgnaagaattcaaaaggccccttaagctttaccccaa

SEQ ID NO: 4545 - DNA, 371 bp, Homo sapiens
  misc_feature 349: n = A,T,C or G
gacccagccagcttcaggtgcagtggatatgtggcatccagcacaagccttccctgcagccgtcagtgctgctgttttccagatgtgcgcccattcactgcgtgccagtgctgctgccgcaaatttggaagtttacacgtgcatcacgaagtaaaaatgactaggaagctccaacacaagccattacataaaagctgaaattttgactattcactgatttttctttcaaaagtattgatgaagaaaattcccttacaaccagagccgcattcaatattggaaagaacttgtggataatgcttaggcatttgagaaagtcagaaggttcttattaaaataaacactgggnaataaacttttaaaaaaaaaaa

SEQ ID NO: 4546 - DNA, 196 bp, Homo sapiens
gaaggatcctatttctcactcactattggatgagcatctccgtcactgcctaacacgctccaccaacatcgaactgaccaactgtggtaaaccagagccaaaccccaaagattaaactcatctctgatgagtgttgcctcatctctgatgtttgtatttcaaacaataaaatgaaggtgcaaactacgagcactgt

SEQ ID NO: 4547 - DNA, 591 bp, Homo sapiens
  misc_feature 261, 268, 406, 489, 531, 566, 570: n = A,T,C or G
cagggagagaagaggcaggaggctggcaggattcttccaggtgaaacggagaaactggtcttggtcactgtcccaaagccaattaaaatggctttggccaggacaatctctcctggacatctgtctacaccaaaagtcccaacgtagagctggaagtggtgccttcttcctcacccctcaaggaaagtttgaaggataacagcacttcctgctcttaaagagaatttattacacacatttcttttgcaagacaagtcccanaggccangaggcccttccagctggcggagcagcaacgtttccaactatagaagtggatcctgccccccaccccagagaaaggcagtgtgagtctcaaaaagcaggcactcagcctagcggaagggctcgccccaacccgctgctnacagggtagcaaaggaactgctggtgggctggaaacttggctcaaaaccacaagggcaagcacaaaaccttttttggattctnctggtttatctatcaaaatatgggcattttgcattttactgnaccatacccccttattggtctactataaaatgggntttnaaacatctggaccaaaaaaaa

SEQ ID NO: 4548 - DNA, 267 bp, Homo sapiens
  misc_feature 19, 27, 29, 44, 53, 73, 92, 93, 94, 97, 107, 109, 114, 115,122, 123, 129, 130, 141, 143, 149, 161, 219, 226: n = A,T,C or G
tagcatgtgacatatggangggtgaancntcttaggacatattntgaaagagntcactcctacatactgatcntaaagccgacctccagatnnnatnctggcccatncntgtgnnccatacnnggtgtnntcacgactgtngnggctgnaaccacatcttntgaagatcgagaatggactggtgttaccaggggctgggaaggattgggagtagggggnatgaaanagaggttgattaatgggtacacaatctcacataatgtattg

SEQ ID NO: 4549 - DNA, 378 bp, Homo sapiens
  misc_feature 131, 134, 141, 162, 179, 181, 182, 186, 199, 209, 222, 264,273, 292, 307, 316, 322, 328, 337, 353: n = A,T,C or G
aaacctggacccctactaaacagacctgctggcacgcagagctcagccactaccaaccccattgacaccttgaaatgccgccttctggcacagattcaggtctgcaatggcaggactaccaggaaacaggncgnggaagantcagggggaaaacacacctgnacaccattctgttcccnannccanagggcccccaggnccagtgcacnaagaccagcttgntcccaagacgccccccaatcacccccccttccccatcccacntcccacaantcgtctcaatcccaccctnctgggtaaacggggnaataccccnattttnggtggnaggccctgngacccctaggctttgncccccatcaaattaaatattaaaca

SEQ ID NO: 4550 - DNA, 123 bp, Homo sapiens
  misc_feature 31, 62, 75, 80, 81, 83: n = A,T,C or G
ctggaaacttcctccgtggggccaaagcctnaaaatatagccatttctattcctgggggaangccatttattatncaggnncntccatacatcatcatgggaaaactgggaaccttctaaggc

SEQ ID NO: 4551 - DNA, 267 bp, Homo sapiens
gtatggaatccagcagcagttttcctgggctgcaatggaggccgggtcctgttctgaaacaactaggcatcactccgcaagtttcttaccccttttcactaatgtggagatgccagaagtagaacagccatgttgagtctcacatttaccatgtaaaaaggatgacagagccacctaccagccccggatgtctgctgaccactgactttgttacctaagaagaagaaataaattttattctttgcgtggacccttgaaaaaaaaaaa

SEQ ID NO: 4552 - DNA, 120 bp, Homo sapiens
  misc_feature 31, 34, 36, 38, 39, 42, 61, 70, 79, 82: n = A,T,C or G
tttaaatccccactgaggtatggcatccagnagnantnnccntgggctgcaatggaggccnggtcctgtnctgaaacanctnggcatcactgccgcaagttgcttacacccttttcacta

SEQ ID NO: 4553 - DNA, 351 bp, Homo sapiens
gaagtttgatggcatgtctttatatcatggccatgggcaggacttggaaaaagttttaccactaaagcatctatgaactcaagaaagaaaacactggctatgtacaatgatgactgtgatcttttaaatttatctcaaatagcgaacctaccagtcatagttgttatgaggctaaagtgagatattgtatgttaaagtgctttggaaccacacattgccataaaaaggtaagatcgccacatggtccctggtgcaaacttctgataaagagcatgtgcttaaggaacatgccaacgttacgaaggcacctgggcctgcagcctaattacctggaagaaaagcagaaaatct

SEQ ID NO: 4554 - DNA, 107 bp, Homo sapiens
  misc_feature 23, 52, 72, 75, 84: n = A,T,C or G
ggacggtcttgggggggggggcnacccttgggctttttagggtcaggaaacngggggggtcccccccacccnacncttaaatgnggaaaaaccaaggcccccctttt

SEQ ID NO: 4555 - DNA, 335 bp, Homo sapiens
  misc_feature 125, 129, 145, 160, 185, 186, 189, 198, 200, 214, 222, 224,238, 312: n = A,T,C or G
tagttgtgataaatctactggtgaaagaagctgtcctcaattacctgcttctgcttagtatttggctaaagatactatggaaggaagaatgctgtctcctcaaactggtgatcttttgaagctgngtcnaaatattttcaaagcnaatgaactgatttangggaaaaatgctcttcgtgagtgcnnacnttgctctancnatggggatgtttgnatgtgtgngngaaaaaccccgggnaaaacaaaaaccaaactcatctatgtggcagacatattgcatctaaaactttgttttgcaatcaatgataaacnctcattccagatcaaaaaaaaaa

SEQ ID NO: 4556 - DNA, 337 bp, Homo sapiens
  misc_feature 28, 30, 39, 40, 41, 52, 61, 64, 67, 75, 77, 78, 83, 86, 93,121, 123, 129: n = A,T,C or G
aggcgggctacaagcttgctccgtgccnancaatctggnnngcagactgggnttggatccnagnatngtgtaaanannaatcnttnaaagctngccaccactgccagaagatatacagggncncattgnccccctgaaatcctattctaagtctgctcacttcacaatccatgaagaatccgcctctgacatcctcagtgccacattaactagtgcctatgggccggcacagagcatactatggggacactcattctgcaatcaaggaaatcaagggaaaatagaagttaggtcactaatttttttctaacacatagaaaataagaaataaaattct

SEQ ID NO: 4557 - DNA, 319 bp, Homo sapiens
  misc_feature 28: n = A,T,C or G
gggggggaggcctacccctgcccttttnaaggtcaagaaacctggaggaaattttctttttcttggtcccggcttggatggggaaccaacccaaaaatggggattttaaaaaagggggacttcaatttcccaaaaaaggaacaagaaaccaagggccccgaggcttcaatggcccttggtaaatccccagccactttttgggggaggggcttgaggggcaaggcccgaatgactttgagggtcagggaagtttcgaagaagcagccttggcccaacaatgggtggaaaaccccttggcttcttacttaaaaaataaaaa

SEQ ID NO: 4558 - DNA, 144 bp, Homo sapiens
  misc_feature 45, 49, 51, 52, 54, 64, 95, 120, 121: n = A,T,C or G
catgtgctgaggtgcccacgatgcgcctgactgccaccaggaaangccnanncncccatcccgngaagccatgcaggaacacgaagctgacgtcngcttcgtggccggagcgctgcatgnncgtggctcttaatattttgtgcg

SEQ ID NO: 4559 - DNA, 118 bp, Homo sapiens
  misc_feature 49: n = A,T,C or G
tggggatgatattgcagaagaatccagaggaactgggaaagccatctgntacagccaacggctactaagtttaaaagtgactccttttggcacagtggccatgtgaaaaaaattaaaa

SEQ ID NO: 4560 - DNA, 351 bp, Homo sapiens
  misc_feature 75, 270, 279, 324: n = A,T,C or G
tttatgtccgataatggagaggggatgattagtaacacagatgcaaaagcagccctgccttgaaccacttctcanagacaagttcaggccaactctgctctgaacacagatccagttccatctcaactcggaataaagattcccagtccaggatgacacccatcccctgggcgaatgccccatgtgccctggaaaaccacatgtgcagttgttgggtgcagtgtcacatggatgctgattggatcacgggaattggcagtacttgaagancatctaggncttaattttttttctagttattttatcaattgccgagagaggagnattaaagtcttctgctttgtgaaaaaa

SEQ ID NO: 4561 - DNA, 142 bp, Homo sapiens
  misc_feature 18, 23, 25, 29, 35, 38, 48, 76, 82, 93, 96, 110, 118: n = A,T,C or G
gagatggttacacacagnatcangntganaatganganctgaggtgcnagatttgcagggatgcggctcaccaaancccaantgaatgcctgnctncctaccagcaagcncacagatnatcttcccgctagtaagcctttag

SEQ ID NO: 4562 - DNA, 256 bp, Homo sapiens
  misc_feature 22, 35, 73, 81, 89, 94, 100, 106, 109, 137, 142, 152, 157,160, 183, 188, 195, 202, 204, 218, 224, 239: n = A,T,C or G
aaaattatcctggattattcangtagggtcctaantaccatcacaagtgttcttacaaggaagaggcatgtangagatggnacacacantaaangtgatnatgaanatngaggtggagattggagggatgcggtcanaaatncacatgaatnccgtngancttccacaaggcctcatgattancttcnctagaantcttctntnagtgggagctttgncccctntttattcatcttttnatttcttgaaaccctag

SEQ ID NO: 4563 - DNA, 191 bp, Homo sapiens
  misc_feature 23, 29, 49, 56, 58, 65, 81, 85, 99, 100, 101, 111, 116, 137,150, 164: n = A,T,C or G
ctatgaccctgaaggtgaaattntttacnctctgaatgtagggcattanaatacanancgtcaanaagtgctgtgattctncatntacacatgcttggnnnacagaagccncaganagagaccaccctactctcagnaccactttgatangctcatcttcatanattgacttgaagccacctttctatttc

SEQ ID NO: 4564 - DNA, 388 bp, Homo sapiens
  misc_feature 38, 41, 44, 52, 53, 61, 64, 66, 71, 73, 76, 82, 83, 110,164, 191, 200, 235, 286, 299, 300, 313, 323, 361: n = A,T,C or G
tttggaaaaaccccttttgaaatccctcgcgttattcnggnaantgtacccnnggaccccnagngnaaggnangcncctggnnccttcctaaagccggaacccaaagcgnaaaggctttaaaggccaaagaaggcacgtgtttgaaaggtggtcccgcaagccnccaccgccaaaaaagaaagatcccgcnatggtcacntcaccttcaaggcggggcccaaagaacaccttggngaactcccgggaagggccaagccccagaattatcctcggggaaagaagccnccccccagggaannaaacaaagctttngggcccactnttggcttattcaatccaaaggtttcccggcttggaccnccttggaagtccgggcccggggggaag

SEQ ID NO: 4565 - DNA, 149 bp, Homo sapiens
  misc_feature 22, 30, 34, 41, 42, 51, 92, 102, 109, 112, 117, 119: n = A,T,C or G
tcatttaaacgactcctggcanccagaccntatnttccctnnctcaatggngggagaaaattctaatccagaacccgtggctcttcacgcgntcagaaccanctccacntcnatttntncaatttttcagctctcttaacccatcacaa

SEQ ID NO: 4566 - DNA, 196 bp, Homo sapiens
  misc_feature 19, 23, 35, 53, 60, 61, 73, 84, 120, 126, 127, 128, 130,144, 154, 162, 169, 170, 176: n = A,T,C or G
caagaacatttgtaagccnacantgaaattgtatnatatgggtgttaagaaanaccaganngttgcttggtanagaaactgaanagtgtgaatcttgcgggcaccacaatagaaggcaangatgannnanggaggacggctggnattcaatttnctgaaccnactgtgnnccaacngacccagctactgtgacagc

SEQ ID NO: 4567 - DNA, 105 bp, Homo sapiens
  misc_feature 20, 32, 42, 59, 86: n = A,T,C or G
caactgacgattttttctgnccgctgtatggnacaacaaganaggcattaataggactnattcaaaagacagaacatggtcgaggngttcgcctgtaatgaccag

SEQ ID NO: 4568 - DNA, 357 bp, Homo sapiens
atgtcaccttttgtgtataaacacatatcaaacttcatgcaggcaactactgatgtgctacagaaggtcctgacaccattttgaccatcagaagcaagctggctgtctcaagacatcctactcagcatgtgagaatctgtgcagcagccaatgagctatgaggaacgggaaaaaattaaacctactaataggtagcattggaataaagtccattcctttattaatatccttgatttatatatctctacatacccagtgcctagagctagcaaaattcctatatggcatcagtaaatatttgtttaaaaagctaagagatttcttcattcatttaaaaaaggtaagtgaaaaaaaaaa

SEQ ID NO: 4569 - DNA, 400 bp, Homo sapiens
  misc_feature 25, 30, 36, 65, 66, 78, 82, 99, 107, 109, 110, 126, 128,185, 192, 215, 251, 264, 273, 285, 296, 335, 341, 343, 360,370, 376: n = A,T,C or G
gttgtacaagggtttaaatgaagantttgngatganaaaattatcctggattattcaaggggggnnctaactaccatnacangtgtccttacaatggangaggcagnanngagatgggacacacangnaaaggtgataatgaaagatgggagggtgggagattggaggggatgcggggtcacaanccaaatngaattgccctgcagcttaccatnaaagcccacatgagaagctcccgcttagaagccctntgggagggaagcnttggccctngtccaacaaccnttggattttgnaaccccaggtggaaaacaaaatttgccaaactttcttgntccttncntgggaacttggggaaangtaattaaanttttcntggtttttttttaagcctcaaaaa

SEQ ID NO: 4570 - DNA, 138 bp, Homo sapiens
  misc_feature 19, 27, 30, 42, 45, 46, 49, 58, 99, 102: n = A,T,C or G
cagaacatgctctgagggntttggaantgnggcgataccccngcnnagngacaggctnttatgggcaacaagatagatctccaaggagatcacaccatnaantgcttttaacggaaaagatgtgttaactacaaatca

SEQ ID NO: 4571 - DNA, 129 bp, Homo sapiens
  misc_feature 33, 46, 49, 50, 63, 77, 89, 91, 102: n = A,T,C or G
cagaacacagacgtggaaaagagtgctgggatncttccataacttntgnntggatcacagagnccgtaaagagaccngtctacctcaanantacttgataangcatctcataatgactgaaagccactt

SEQ ID NO: 4572 - DNA, 120 bp, Homo sapiens
  misc_feature 16, 21, 30, 31, 35, 48, 84, 93, 97, 99: n = A,T,C or G
tggccaaatgaagttnaaacncttgtgatnnagtnagctgaggggcgnaaattctttgcaactaccttgtgtcctatgcctcanagttccccnagangngaaaaagacccccaggagagg

SEQ ID NO: 4573 - DNA, 191 bp, Homo sapiens
gaagagtataaaagaccctttgtctgggttaaatagaagactgacggtgtgatggagtgtgtactgcagttcggctcaccaggtatgctgatttgagctccttctcttctttcttgtatgagccacattcataatggatccaataatggccacaaataaatcctttgcaactcctcacaatgaaaaaaaaa

SEQ ID NO: 4574 - DNA, 296 bp, Homo sapiens
  misc_feature 26, 28: n = A,T,C or G
actctggggagctacctgcttaagtncnaactgatgctgattcctgcttaccaccctgtgacggtagcaacgccagcaggaaggagtcaaggaggaaatgcagtggagagaagagagcccgttagtggatctgggctaaatcccaattctaccatttatcagcagtgagacttctcacttctttgagcctcatttttctcatgtaaatggggataactattctttcctcagacctgtgagacttaagggcgataataaatgcagtcattggtacagaagtactgtaaaaaaaaaaa

SEQ ID NO: 4575 - DNA, 168 bp, Homo sapiens
aagtcctgcttttcatcaagacatttgaagagaaaaagcagccttccaaacaaagactaatttgcaatcctagaagaacattttttaaaaaccactttactatatattgttatttttgcgagacttcttgtttttaaaaaaacttttaattcaccacgaaaaaaaaaa

SEQ ID NO: 4576 - DNA, 272 bp, Homo sapiens
  misc_feature 49, 52, 68, 178: n = A,T,C or G
aactgagttcacgcagtggaagaggtggtgagcgaggtggtgggccacnccnaggaggttggagaganggccattaatgacgccctaaagaaagcccaagaatcaggagacagggtggtgaaggaggtcactgagaaggtcacccacaccatcactgatgctgttacccatgcggcanaaggcctgggaagactgggacagtgagcctgcctaccagcatggctggcccttcctgaaggtcaataaagagtgtgaaacgtgaaaaaaaaaaa

SEQ ID NO: 4577 - DNA, 518 bp, Homo sapiens
  misc_feature 111, 116, 292, 401, 427, 470: n = A,T,C or G
aaacaggggactgtggcagacccacaaagaaaactccagagatggaaaactatgatcctttgcactatgaaataagctagagcacaactgaatgtctgcttggaacacacnacatncacagaaacatctttaaacacagaaggtcttctccaagctcatctctggtgataggacaacagtgggcctcaagcttctccagccagtagcagaccaagatccggtttcaacaaacttggaactctccaagccctttcctgctgtgaactgatttatttggatccatctgtcagancgtgactgaagagtgtccggccagctagcagcccagctgcagcagatgttgtctcagaatgccctgcgaggtgaggctcatatggattttacctgcccgttccacttgntctccttttgccctcctgggaaagantgggaaaggggttgagaacatctgcatgacccatgagaaccangaaagttaacagggcatcttgggggccacagagcactaaggactagga

SEQ ID NO: 4578 - DNA, 542 bp, Homo sapiens
  misc_feature 18, 38, 39, 44, 81, 107, 132, 135, 139, 141, 143, 148, 170,186, 233, 261, 287, 305, 306, 309, 312, 322, 327, 329, 331,350, 355, 369, 375, 385, 388, 390, 392, 397, 403, 408, 413,417, 425, 442, 459, 473, 488, 519: n = A,T,C or G
gggggaagcttaccttgntttaaagtcaagaactggannggggntgaggaatgccattccccaagcaagtgggagggtgtnttttaaaggggggaaacccaaggggnaaccaagggtggaaaccttgggggngangctngntncaaangggccaaagaaaggggtgggtngcttgttttgggaagnttcccttggggggccctttcacccccttggggattggttcccaaagnacaacaacccttgcccaagggggttttngtggggagccaaggccttggagggcnttcttaaagggcccaacnnccncanggaacccgtncttcnanangtcttacccataccccaanggatntcaacccccatttnaccaantcttcttaantgnangnggggnccgaanccccnccaangggngggaaaanggccaaaaggggtttcngggcttcccttggcgtngaatcccccaactnggggggccctttttngggggaaaggggagggaaccaaggacctttntttaactttaaaaatggatttcc

SEQ ID NO: 4579 - DNA, 101 bp, Homo sapiens
  misc_feature 22, 38, 46, 49, 51, 54, 75, 78: n = A,T,C or G
agaaatggatgagctctaccangcccaattcaccccancggaaatnacngnccntttgcatatgcaaagctgagnccntgcttatccttgaaaaaaaaaaa

SEQ ID NO: 4580 - DNA, 249 bp, Homo sapiens
  misc_feature 22, 28, 31, 35, 59, 81, 86, 87, 94, 99, 109, 124, 137, 182,203, 211, 215, 220: n = A,T,C or G
tcatcattacagccggaagatngaactntgnagtnttcaaatttacttctaattcttanctgctgcaaagtggggaaactncccannccaactngtctnatgggccccntggggagctgccctnccaaaaatggggnttttacaagctggggaccttatttccctttttttgggccaattanggggcccctttttgcaaaccntttccccncctnaaaancttatgaactccagccctgaacttcccgg

SEQ ID NO: 4581 - DNA, 120 bp, Homo sapiens
gtatgatgggactaatgcttcacctccaagacatcagaggctgccttgacttccataaaataatcaactgtaggctggaatagtcaaataaaataaacccatctcccctaaaaaaaaaaa

SEQ ID NO: 4582 - DNA, 151 bp, Homo sapiens
  misc_feature 23, 29, 83: n = A,T,C or G
ctaatccatttaaagggatggangattgntgtccatggcatcctctgaacctaagatcctaagacgtgtcacccataatctgntcacaccatccaaaagaaaccctgaaggcacaggtgtttctgggctacgtgaggcaaaaataaaaaca

SEQ ID NO: 4583 - DNA, 338 bp, Homo sapiens
  misc_feature 16, 19, 21, 43, 69, 72, 76, 78, 83, 97, 105, 123, 131, 153,154, 156, 165, 181, 229, 237, 245, 247, 249, 258, 279, 312,319, 321: n = A,T,C or G
ggtgccctccgctatnttngnccagagcgcggtctcaaacttnctggcctctaagccatccctgctctncancctncnagggnagctggaattacangaaactgnagaatcacgctccaagangagatctnctggcgggcctaaagatcacannancaaagcatnaaaccacaagcttgtntcggaggaccgaaactccagctcttcacccagaagaatagttcgtggngctgggtngggctttnangngcccactanggccttttgttattgaagctnttcttttcccaagcgggtccctttttatttgcntaatcananaaatacccacctggaca

SEQ ID NO: 4584 - DNA, 474 bp, Homo sapiens
atacctctacatgccaccttattgtgactggaactgattgtctgatgcattaaacctgagtggaagatccagctctacagaatgaattactgatgccacactaatgctgagattaaccttcaatactgcctgggctgctccaccacgtgctacaaattagatgacatatacttccctgctccagtgacttgggacttggtcctgtgatttcctttggttaatggactgtgatacaagaaatattaggcaaggctgcatggtttggattgtctgcttgccctcttgtgatttgccatcaaaagaacatgccttagggagatgctggcccaagaagaacatggtgacacatagagcagatgtgaacccagttctaagcctgaagccaagcccagctgaccagcaacttgaaacagggtctccctggctttcctacactcctacgatcaagaaaaataagatgctgggtggtgattc

SEQ ID NO: 4585 - DNA, 528 bp, Homo sapiens
  misc_feature 25, 28, 58, 60, 64, 65, 66, 77, 78, 79, 93, 96, 99, 103,108, 112, 113, 114, 115, 116, 117, 118, 122, 124, 125, 126,137, 157, 158, 189, 191, 193, 197, 279, 282, 304, 312, 327,329, 353, 405, 419, 422, 429, 431, 432, 438, 459, 461: n = A,T,C or G
  misc_feature 464: n = A,T,C or G
gcccagggtgggatgcttacggccngtnattccaggcacttgtggcactcccctctgnanggannnccgatgttacnnnatcaacattatacnggnctncacngacangccnnnnnnnttcnannnaaaatggaggnattcgcaagcctgattggcnntatggaaggccttattgaggcagaaatggangnanatcncacctgctcttgatatacacagctgatctgggcactgagtgaagtcttatttcctgtctatgaaagcagacacttgaaccantcnctcctttcttcatacaatgtgngcgccctnaatcaaatttgctgnantctggaattcgggacttaagggcngattcttttttaatgtgaatggaaggaaagcatttgaagattgatgcaagantatacatgtttgantanttgcctnannggcccncatttgatttaacataaacananccntttgctttggattatattaaaacatttaccacacattgcctcaaggatttaaaatattttactc

SEQ ID NO: 4586 - DNA, 212 bp, Homo sapiens
  misc_feature 24, 26, 29, 43, 46, 85, 91, 121, 127, 134, 136, 137, 150,162, 163, 172: n = A,T,C or G
ggcatttttcttgtcatttggaantncanctgaatgattgcanccntataaggaatgggaagactattcctctgtagcccccatnctgatntaaagtggattcctctgtgagagcccctgncacaancctgaananntgtaacgaatcangatgttatctanntggaacctngccttattgtaccttggaaatgaacccttcccgagggccc

SEQ ID NO: 4587 - DNA, 217 bp, Homo sapiens
  misc_feature 30, 53, 54, 71, 96, 126, 151, 153, 154, 158, 159, 160, 162,169, 173, 193, 198: n = A,T,C or G
gcatgcccatgtcacctgccttaacgggtnggggagccaatcacaggtggaannactctctgctggagtanatctgattactttctggagcacctngccacaacgctagatgctctatattaatcntgatggttagcaaggctgcacctgntnngggnnncncgcaganaatnttcaccgccgggccaggtcnaacancacacattgcgcttctgaa

SEQ ID NO: 4588 - DNA, 362 bp, Homo sapiens
  misc_feature 28, 41, 150, 151, 165, 180, 185, 289, 300, 319, 320, 334: n = A,T,C or G
ttaagtcagaaactgagggcaaaaactntacagaaagggcntggagaggaaagagatgggtcttgaagaagaaacttgccctagggaggacccacaccttccccctgaattccacttccttctggtaccaaaaccccaaacttaaccttnngggcccaagcccanccaaatgccactttnggctnttggaaaagcttggaaatcaaacaacaatctactcctctttatggaattgctccatttaattaatcaagaactcaaaaaaaggaaagcctggcttaaccccccnaagaaaagggnactgggaccccaatttgannctttgcccacaaanttggctttcaaaagcccaaaccactttc

SEQ ID NO: 4589 - DNA, 183 bp, Homo sapiens
  misc_feature 20, 32, 46, 55, 58, 85, 86, 87, 101, 109, 112, 115, 117,121, 135, 145, 148: n = A,T,C or G
atacttgtaattcggacatngatgctgcacgncaccaggccttagnaggaggggnagncaatcaaggggaacctattatgcaccnnncaaatgtaggactntttggagnccntgncncaanctgatctttattanaatgatgacngtnctcatgtgcacacacatggctttgtcctacattgg

SEQ ID NO: 4590 - DNA, 261 bp, Homo sapiens
  misc_feature 24, 25, 40, 50, 64, 65, 70, 72, 73, 76, 101, 103, 118, 120,127, 142, 160, 165, 177, 187, 204, 232, 239: n = A,T,C or G
gggggctccccttggcgtttttanntcctgaaactgtagnaccccgtatngccccgtggagggnncacanannccnttttttggggggccctttaaggggngnggggaaattccaccncnttttaanaaaaggggaaaaaanccttaagaaagaatcccngaagnagcagggggggncccctgggcnaacaattggaattcaanccccctttttaccaaggggcctttaacntttcctnttttcccttggaccttttttta

SEQ ID NO: 4591 - DNA, 154 bp, Homo sapiens
  misc_feature 36, 38, 45, 51, 59, 69, 71, 79, 95, 105, 115, 122: n = A,T,C or G
gagaataaatttctgttgctttaaaaaaaaactttngngcgggtncaaccnggttaagnccaagctgantnggcctcgntggccttttttttttntgggactaancggagtctcnctctgtnatgcccacgctggagtgcagaagacatggtct

SEQ ID NO: 4592 - DNA, 165 bp, Homo sapiens
ggaatcatctgtttacctgagcgaagactgcaaagaagtaacaggcaatatcaaaagaaattgaaaagataatagtatgaagcagaagattgaagcgaatctaaccaaagaaagctcttgtatctaaagcaaattgcatgaattaaatacagacaagagaatgtc

SEQ ID NO: 4593 - DNA, 292 bp, Homo sapiens
  misc_feature 240: n = A,T,C or G
gaaaggagcaatcctcaggcccacagccttctacaggtcagtcataggaagaacaattgagtgaaactgaaggaagaggcaaaagtgacttaatgatgataacagtgcctgctctactctgcttctgcagaagactcacttactggacattctggagcattcatacagaatagtgaacccccccccgatatcttccatatcttcccttgctaggcataacagaggatgaagcccactacngtcttgagagcctcctaaaacacaagtcaatttgattagaatgaaaaaaaaa

SEQ ID NO: 4594 - DNA, 332 bp, Homo sapiens
  misc_feature 48, 101, 109, 116, 119, 123, 126, 140, 147, 150, 153, 164,168, 186, 195, 201, 205, 217, 219, 227, 247, 268, 288: n = A,T,C or G
aaggatatgactggaagacagacacctgcaaaccggaaagagagctgncaccaagaacctgactgtgctggcaccctgatcttgaactttcaccctccagnactgttanaaatcantgntganggnttactctacccagnctatggnatnttngttacagcacnccancctgattcagatgaggcnacaaggacncagcangaangcagacttttgnangtgaggangaagaacccgaacctgtatnccaccatgctgacactctganctcagactttcagcttccanaatgctggaaaataaaattatgttgtataagtgaaaaaaaaaaa

SEQ ID NO: 4595 - DNA, 147 bp, Homo sapiens
ggtctcagtcctgggaagctctgggatgaacatggctcctgagcatagacaccaccctgacagaggctcgtgcgtgttcagcttcatcctcggaactttacactcacgcttgactcactccactttctgtgtctttctttttttttg

SEQ ID NO: 4596 - DNA, 347 bp, Homo sapiens
gttttcagtgatgttcagagccaacaggaaattaaccagcaagtagaaaattgaaagaagatctgcatcttactgcaggagtcattaaaataaaagcagatttggcaaaatggcaagaaccagaggatgaggatgtaaaacaaaaacttttggagtcattttgccaccaggatgaaaataggatgaagctgacatgacaaaggtgcagcacagttatggcaaaggagctatcctgtaccaacacgaaggagagagtggtaaaggaccccacaggaatggagggaatgatattgacacaaaaatggcaacaagatctaactccagcgtcaaactgaagttacacgtat

SEQ ID NO: 4597 - DNA, 490 bp, Homo sapiens
  misc_feature 36, 59, 137, 140, 153, 162, 165, 215, 231, 234, 236, 256,270, 272, 274, 280, 283, 292, 293, 299, 339, 343, 347, 348,356, 361, 409, 414, 416, 462: n = A,T,C or G
ggctgttcacacatcgaaaaatgtttgctcactcanaactgtgacccggatcattcatngggatgagaaatgacaccccagcactgggtagctggggctcgaaagggtccctacccccttgttgaatggctatctgnggngggcctgccaganctgcagggncancaagtggaccttgacacttgttcctctcttcagccagatgaagagggcanagagagagcggggaanagncnggcagtttcactctcaccgnggattaagtcattngngngagaanganactaagttnnggcagnccattctccttgcattttcaactgagaaataggtctgatncttngggnntggaaatncccanagaatcccactgaaattttctctgggcatatccttatcctttatgtangggancncctagagcaagttcatttattcacatttaaacatagatttctgaanctcctcctctgcacattgggcgggggga

SEQ ID NO: 4598 - DNA, 163 bp, Homo sapiens
  misc_feature 17, 26, 30, 42, 44, 57, 58, 68, 84, 86, 88, 98, 99, 104,113, 146: n = A,T,C or G
gcagcataaacaccctngagatcatncaantagaggcgagtntnggcagctcattcnncttattgctnagtggtgttccgcggngngnaggggccacnntttgntgaaccggncgactattgacaggcatttgcgctgttttcaanttcgagctgtgctgaac

SEQ ID NO: 4599 - DNA, 544 bp, Homo sapiens
aagccagcctcacctttaaagcgtcaagccccttcccaaaaacctctcaaatcgcaagtcacctggatcctcagagggctacacgtctcagcctgcctgcaccaccccagaggtccccagtggatggagaatgcctaactgcttgcggtacccagatctcggctgagatttctcccctctgtcctgcaacctgagctgtgtgtggtttagtctaattccttccgagtctgtgcagccctcgctggaaccgattctaagctatctggtgccctctgctggacaactgcaatcatggccaaagtccagtttcccagagtcccagggaagcagaggaaacacctccccagattattttaattctctccaattccaacctgcccctatttgcactaaaaggattccaggtgtgttatgaggtttgcatcatgtggtgagaagaattcaggactatgaactagctctaattcaattaagccccgagctttgtgtcctaggcaaattactcatgtggttcctcagttggaaaaaagcaatgaccaactgc

SEQ ID NO: 4600 - DNA, 464 bp, Homo sapiens
  misc_feature 72, 335, 352, 368, 373, 380, 402, 441: n = A,T,C or G
gaggggaggaatctgcacagacaagggccagggttcagacagaagacaacgcccacaccagccacttggatncggaagattcctgtacacacttgcatgggtgtaaaattactaacctggtggctaaagagcacgtgtctgaagagcggccaccaaaaggagccactgctgcaggggtgtccacgcgcgcagggaaagaacggactccaggggctgggtctgctcttggagaatgaggtcgtcaaaacctcacttcgtggggaaagtctgcaaaagacagtttcctgcttttgttcatcgtgggctagtaggaaaccggtggcatcctcccagtngaggaatgattcccagngagggttgtaattgtnggccnaagaatncctcggttggcacccccttggnaatttttcactagcccaccgttgggatttttaagcccanaatcccagggatggatgcccatg

SEQ ID NO: 4601 - DNA, 114 bp, Homo sapiens
  misc_feature 21, 22, 42, 47, 57, 58, 65, 87: n = A,T,C or G
caattgtaattcatggtcctnnaagatgctgacaccgctgtngggtngggaacaaanntttaaancccaaaaaggggggggcccccnccccaggggaagggggccttttttttt

SEQ ID NO: 4602 - DNA, 307 bp, Homo sapiens
  misc_feature 17, 33, 36, 43, 87, 106, 120, 124, 146, 160, 172, 189, 213,227, 252, 253, 278: n = A,T,C or G
cggtcttttccaagggngggatccgaacgcgtnatngataaancttttgatgagccggcaccatggggatccggccatttgaacaangatgggattgcaccgcaangttcttcccggccncttnggtgggagaaggctatttccgncttattggactggngccaccaacaanaacaaattcgggcttgnttcttgattgcccgcccgtgtttnccgggcttgtccangccgccaaagggggccgcccccggnnttctttttttggtcaaaagaacccngaacccttgttccccgggtgccccctttg

SEQ ID NO: 4603 - DNA, 167 bp, Homo sapiens
  misc_feature 52, 55, 77, 92, 113, 124, 137, 149: n = A,T,C or G
gagcgcctgcgtgactcactaacatgccacacatcacgcaggtatcacgcanttncactctccatctattacagggngtaaggatactggtntgcaacaaaccgaaggggtgnccccccccttnttaaaaccccttntgggggtttttnaaaaggccaaaaaagccc

SEQ ID NO: 4604 - DNA, 307 bp, Homo sapiens
ataaaattaaatatagacatcaagatctaaatgtatcaagtgggtgcacaaaaggaccccaggagggggaaatggagaaaatttcaggtgcttatgccttcacgcacccttttctctgccatcctgccctcgtcttcactgtctgcccactgagacctggggtcactgctcactttcagacaggaaattgaaagacctttgcaaacacttggtcccatccctctcaacttccatttcctaatccccaaaggccaacgtggaaataaaaagatgctttcatgttgaaggcacctgggaaaaaaaaaaa

SEQ ID NO: 4605 - DNA, 185 bp, Homo sapiens
  misc_feature 25: n = A,T,C or G
gaactggctgttaaatatttaccangcacaccacaacttcagcagaactgtgtccagccttggactccaatgctggataaattcaacctcccgcaacagtgactgccagcaagggactctgagaagtgtggaaaaattgagaataaagaatcctctgaaaatagcctttcttaataaaaataaaa

SEQ ID NO: 4606 - DNA, 456 bp, Homo sapiens
  misc_feature 293, 332, 344, 368, 427: n = A,T,C or G
aaatgccagaaactgcttgggtggcctgagaaacatcgctgactggtgggactggagtctgaccacacttctggatggcctgtacccgggaggcaccccgtcagcccgtgtgccgggggctcagcctggagctcttggaggaaaatgctacctaataggcagttcgtaattaggcagcttaaaagtttttcctaggcatttatgcaagcctcccaggccattttcagcactcatcgaagactctattcctacatgtagtcccgaagttggaaggcccttgagaacccctaccngatagaaccagaagaaccaaaccgtgaccttgaatgggncttggggcttgnggaacaaggaagaattgggtgctnagcctggccaaacaaggactgaagccaaacagccttgtcccaattaaagggccacaatntgatttgaccggaacaccaagggctgggt

SEQ ID NO: 4607 - DNA, 155 bp, Homo sapiens
  misc_feature 36: n = A,T,C or G
acttttgtctcaaaaccaaccaggacaaaaaacccncaggatgtgcctcccaagggcaaagggctttctgcagttcattcaccactgcctccttcacactgggacggtgcctggcatgtagtacgcactcaatatgatattgatcaaagaaattt

SEQ ID NO: 4608 - DNA, 137 bp, Homo sapiens
  misc_feature 17, 41, 44, 60, 67, 75, 78, 90, 91, 100, 109, 121: n = A,T,C or G
agcagaaggcaagggangcttccatgagttcttgccatcancancatggaccccacttgnagtgccntgctgccnttncacaaaagcccnncaaaggcgntgaacgctnacataacccatntcagtgagcccttacc

SEQ ID NO: 4609 - DNA, 407 bp, Homo sapiens
gcagaagaaggagaagggtgaagagcaaaagatacaggctaagcgagactacctcttcttatattttcctgaatgaagccacagccagcacgctctgtctacctctcattggccgggaactaagtcacaagaccacactgcaactgtaagatggaaacggcttctttctgagaatatcctgcgacttcagaatgattactctcataaagcatgcagccacagaggctggacagagatcttcagccttgtgatgaagggaaactgaggggggggcgggctgcagaaaggattcttctccttaacctaatttacattcatctcctcataaagatgatgaagcgagactgaattttatttaattttcatgccttgaaattaaatctctagtccactcccaaaaaaaaaaa

SEQ ID NO: 4610 - DNA, 523 bp, Homo sapiens
  misc_feature 493: n = A,T,C or G
cttcagccttgcccagctcctggtggaacttccggtaagggatgctcacagagcacagggtggggagctcccctggcacgtggaaatcacatcacactgttggctggcaactccacttccatgtcaatctggtgccagctccgggatcctgaaatgccctgcatgaatcatcaagggacaaaaagaggagactttccagggactgacgccctcccagccaccgtgggatcccggctactgtgactgagcccagtcatgactccagagtgcttcacatcacatcattctttctcagcatccaaaatatgaaggaactgaacctcagagagaagagataaccctggtcggccagtaaactgtagagatccaatttgaattctcccctctgtctggctccgacacatggggttttcttaactcacactgtgtcacctgcagagtgtttcccttcgggggagagagacccaaaatagtgaaaacgaacagaaaaagnttgaagaagtctgcttcgcacttgaaaccc

SEQ ID NO: 4611 - DNA, 463 bp, Homo sapiens
aagggaaaagaaaaagtggagcacagaaatgaaagaaaggataaaaggaaaagaaagggaaggagaggtgttctggaagtgcctacctggttcagaaggagacagctgaaatcaagccaatggaggtgtctgagccagtcagagccttggccttgctctgacccacagccacaatccaacatgaagatggttcaagagaccttagaccagggaagtgccttccaaagccaaatacaggagcatgagagaagctgtgtcgtgatggaccgcacccatccttcccactctgtgttctctttgtcctgactttattgatggggtgaggtggacttcttgtaaatccatcagaaagatatctgaagcatacctcggggtatatattaaatctaagaacctgatgtccttttactgctgcccctgaataaaaattatgcatcttgtttccgcacttgaaaaaaaaaaa

SEQ ID NO: 4612 - DNA, 500 bp, Homo sapiens
  misc_feature 36, 37, 38, 60, 71, 84, 98, 107, 114, 120, 121, 126, 138,141, 149, 161, 164, 182, 196, 203, 209, 216, 222, 261, 410,448: n = A,T,C or G
accaggtacactgcagccaaagacagcgtggttcannncttcttttaccagcccatcagncatcagtgganacaaactgacttntttccctgcactgngacgtgtgnaggaggntatcanntcaantctgctgaatgngtngatatccncttgaagagggnagntcctgaccattattgtcnctactaccctgaanatgtaanaccaanaccacanctgaangaatgcagcatggatccctgcccatcaagtgatggattnaaagagataatgccctatgaacacttccacctctttctcgagctgggaacataatccttggactgcatgttccgtgtcctgtggaggagggattcagagacggagctttgtgtgtgtagaggagccatgcatggagagatattgcaggnggaagaatggaagtgcatgtacgcccccaaaccccaanggtatgcaaacttggaatctggttgattggcccaaggggattgccatggaag

SEQ ID NO: 4613 - DNA, 138 bp, Homo sapiens
  misc_feature 38, 43, 44, 49, 58, 71, 103, 110: n = A,T,C or G
gaatctggggcactacctgtcattaagtcagcaactgnaagcnnggagnacaactttnctctacaaagtgnaatttccattgtcattacagatgtaaaaccancacatcnccattgcaacagcatgctgtgtggaggg

SEQ ID NO: 4614 - DNA, 103 bp, Homo sapiens
  misc_feature 19, 24, 35, 44, 46, 57, 60, 62, 68, 86: n = A,T,C or G
tgccaccttggctgacccnaggcngcctgcggcangaggagctncnacacccgcctnctnantatganagtccggagaggcccacngatcagagctggtatgt

SEQ ID NO: 4615 - DNA, 465 bp, Homo sapiens
  misc_feature 285, 403, 404, 409, 413, 416, 442: n = A,T,C or G
tttaattcactgagcctgaaattgccgagaattatagagaaaaggttcctccctgacagtttggcaaggaatatggaatggttaaggactccccacccttccactccaaccccacttccaaagcctgagatttcaggacctctgacccagcagctccaggtgtctacggagcatctaaatctggatatcccatgggaacttcaaactcaaaatacccaagagagatccattaatattcccttgcgctgacctgtaacacccgaatcacatgcagtagtatttagntgattctactgctaaaatgtcaaaaaaatttgcccagttttatccaaccctcctattattggccttcattatctttcaccaagaccaggcaaattacctaattttttcttggccaggnnttttnttgnttncaaccaaaggccaaaaatttaaaatnggttaaactggcctttgaattct

SEQ ID NO: 4616 - DNA, 221 bp, Homo sapiens
  misc_feature 18, 19, 25, 50, 51, 64, 111, 113, 118, 120, 134, 196, 198: n = A,T,C or G
ggcatacacaccaacatnnacaggnactgctacctagattggcagatctnntggactggcgttnctggatcacttcaactgattgcgatggtttggttcttatgtgcccantnaccancngtggtatatgctcnttacctctgcggatgaccatataatgggtaggtatcaacatgatcgaggaagtgggctttantntgccatctaatgtatgctgaacc

SEQ ID NO: 4617 - DNA, 371 bp, Homo sapiens
  misc_feature 16, 18, 35: n = A,T,C or G
tggggagctcctgctnantcctgaactgagtcagncactcaggcaaagtgcaaccgagagccaaccatgtgcccggtactttccaagatgccaggataaaacggcaataatatgggattcctgtgcttgaggtttttacagcctgaaaaacaatgacctctgcatttcctactcagcaccgcgtgccatcaacatccaagaaacaccaaaggatggccgcaattgagggactcttctcaatagcatgttcttgtgcttcttcatttaggacacatctcccatgctgggaagtacaagacaaatacgaggagttggcttaccatgctgtatgcacccttcttcttgtgatgatgtaagatgataaaacctct

SEQ ID NO: 4618 - DNA, 151 bp, Homo sapiens
  misc_feature 18, 20, 21, 29, 50, 59, 66, 68, 74, 76, 89, 96, 97, 113, 129: n = A,T,C or G
ccctttttttccggcctncnntctcaacncaggggaccatgggtttatanccacttacncattatntntcatgncnaacaccaattctntgatgtnncacacttctttaaccncctcctcaattctttncatgtcttcacaccattcgcat

SEQ ID NO: 4619 - DNA, 499 bp, Homo sapiens
  misc_feature 31, 36, 42, 101, 111, 132, 135, 140, 142, 145, 148, 150,153, 154, 155, 157, 160, 161, 164, 168, 169, 170, 171, 172,174, 175, 179, 185, 197, 199, 202, 205, 207, 251, 258, 280,281, 293, 318, 335, 354, 366, 408, 419, 440, 471, 479: n = A,T,C or G
ttaaacacaaaacctgactgaccctctcaanaaacnctgacnattaatacagcaatgtgactccacgcaacaacggcttcacctaggacgtatactatttnacagaatcgngctcggctggtttgcggaacnaangaaangnggnccngnaannntnccnnggnctgnnnnngnnattncttccnctgaaaaggggngncgnctncngatctgctgtcaagctgtatttcctgtcctgtgtccttctaagngaacacnatgccacgcgtggtctacggtnntctttgctccanctccccattcactgctgtatttggngtggatgtctctgcagnatgagctattttaaggagncagggctggaanaggcactgagagagcttctggcccccattcaaggacctcctnctaaacacttntctgggatggcaagtatctanaaaatgctgaagaagcattatggagcttctntgctcttnccaaggcacttcaaagggaa

SEQ ID NO: 4620 - DNA, 103 bp, Homo sapiens
  misc_feature 18, 33, 55, 82: n = A,T,C or G
ttgaatgtctggatatancgcttgaatgagggnaggtcgtgaccattattagtcnctactacccgtgaaaatgtagaaccanctccaatactgaaggaatgcg

SEQ ID NO: 4621 - DNA, 224 bp, Homo sapiens
  misc_feature 153: n = A,T,C or G
aaaactccaaagtgcttgagaaccacaaaccaatgcttctgaaatcataccttcagaaacacttttagtggctcatcatttccatcaacagtgaactatgcccgaggccacatctgtaaagctttttatggttcctttgacttatttaaatgnattttttaaatcaaaattttacttgtaaatgtgaacatttatgtatacatattgcatttcaataaaatatt

SEQ ID NO: 4622 - DNA, 181 bp, Homo sapiens
ctaaggtcacacagcttactaaagcaccatgagaaataccaagaagagcaagctatgggtctaccctcaaggaactgaccgtcaaaaggacacatgtaagagcctcacgttaattcattcaacaaacatttcgctctgcagggctcccataaatacactctctcaaccctaaaaaaaaaaa

SEQ ID NO: 4623 - DNA, 326 bp, Homo sapiens
ctgttgggagaatgaaacacaaggaaagcccaggaccagtaccaggcacagggtcagtggcgacagcatgtcaacaactcccctcccttctgcgcctggagattcctctttctccttcaatacatattttgaaatgatatttattaacataaaaattataaaacctttcaaacatccagaaaaatataaggaaaaataccaaatatccatgttctcaccacttggatttaacacatgtgaacatttgccatgcttcagatcctccttttaaaacaaaattgtatgacacagcaattgatgaacggatcatcagtacaatggactgt

SEQ ID NO: 4624 - DNA, 221 bp, Homo sapiens
  misc_feature 21, 33, 55, 90: n = A,T,C or G
tataagccaaacctgagggcngggctgccttcngaattctcctacaaaaagcagnggccaggtcgtatggtccttacattccaggaaatngtaaagctcttcaaactcttcaaattataaaactcttctcttgaagacaaccccttttcttggcaaagagcagtagaagactttcttcatttaaaatcttacaggaaatccctgtgttcgaaaaaaaaaaa

SEQ ID NO: 4625 - DNA, 287 bp, Homo sapiens
  misc_feature 24, 43, 59, 66, 67, 69, 72, 73, 101, 116, 118, 123, 130,139, 146, 196: n = A,T,C or G
ccctcccatcatggagtctgccanatcgctcttgactgacgcntccagaagagcgtgcnttcccanngnganncatgccttaggagtatgtgattccctgncactctttcactatnantacantattatncggtgctgntaagtanttatgcaacaggtgagcatgagtagtgctctcggaagataatgaactgcntcgatactgagacatcccataacgcttgcacccacgtatcgtcccgatgccacaccacatacacctataatagaccggtgcaataatggta

SEQ ID NO: 4626 - DNA, 270 bp, Homo sapiens
  misc_feature 22, 30, 63, 173, 193, 200, 216: n = A,T,C or G
atctgagttaaacaagacccanaaagcatntgactttcaagatttgagtttcatgaaagctgntttttactcaccacactcccacgatggcatctttttgaatttgttgcaatttcatacaatatgactggatgtaaaaagtgacgctgtccattccccctgtgacacacagngtctgcgtggggaaatctgnctgaatnaagggatctacaatcnatgccacattgcattttacatgcaatataaaccgtttgaatatccaaaaaaaaa

SEQ ID NO: 4627 - DNA, 228 bp, Homo sapiens
  misc_feature 32, 56, 61, 63, 76, 94, 96, 97, 102, 106, 107, 108, 112,130, 133, 136, 137, 140, 142, 149, 150, 178: n = A,T,C or G
cttacccacggctaatatcataagcccatganatgctggggacgacactcactttnaattntntacttgaccactntgaaaggcgaccaccctnannacacngtannntganggaataacaagcagcatntgnatnnttnanttaacannccaaataacatcccaggcaagcagccangcattcagactacccatcatgtggagtgaagacacctccaggatgattcc

SEQ ID NO: 4628 - DNA, 167 bp, Homo sapiens
  misc_feature 52, 54, 55, 58, 59, 70, 92, 97, 122, 130, 148: n = A,T,C or G
attacccttttggagacaagttcagcctggtttaagtccaagctgaattggngnncgnnttggacacttncaaatggttgcgccctcgaggnaattnggtatccggacgcgccattttaaanatggccgnttatggcccaattctttngcacatttaccctgggaag

SEQ ID NO: 4629 - DNA, 297 bp, Homo sapiens
  misc_feature 79, 82, 124, 139, 165, 183, 184, 222, 225, 259, 266, 268: n = A,T,C or G
tcctggaaatggcttcaaaacatgactgaaatctccttgaggagcataatgtggagggtgggccctaatacaatcttgnttntttaagaagagggaaatttggacaccaaaaaggagacaccangggccgtatggttcnccagaaaaaaagatcacgtgagggcnccagaaaagggttttgtnnacccaggaataaaaaccttcataagaaaccaaaacccnccnaccccttgatacttgggacttgtaggctttccancaaattngngagggaaataaaatttctggtttaaaagc

SEQ ID NO: 4630 - DNA, 191 bp, Homo sapiens
  misc_feature 27, 42, 43, 49, 69, 92, 107, 109, 114, 118, 123, 149, 153,168: n = A,T,C or G
ttgtatgatgtgcactaattgcttctnagagggggaggatcnnaatggnctcatcacgctcttaaaggncctagcttcttacttctgttgcnatgaccactgtgccncntgtantttntaganggggaccatcattcaccctcatgganttangcttactgggggacncccacctaaatgttaatgggcct

SEQ ID NO: 4631 - DNA, 541 bp, Homo sapiens
  misc_feature 42, 88, 117, 132, 157, 201, 322, 363, 368, 423, 462, 469,475, 481, 487, 500, 509, 513: n = A,T,C or G
caagaatcccatggaatggtggcaagtttcttctttgggaancaaggccgccttgggctttgttgccttgggttcacttaaccttttncaacaaaagttaccttccttgcccaaagnaagggggcggaacanaaggtttcaaagcttggaagttaantgggggggaaaaattggaaaagggaaactttcttggcaccaaanggaagccttgccccaacctttttgttggggggggggaagaaaaaagttgggattggaaaggaaggggggccttgaaaaaaaaaaccttggatgggggccaaaacccttggggattggaagnaaaccaaggtgggacccaagccaagggtgggggaccttttnccaangggaagttaatggccttgggtttttttccccttggggccacccttcaattcaacnttggttccaattggttggccaaaattgggaaccttttcnttttttnccaaanggggcnttgggncccccaaaaaaanccccgaaancccnttttgaaaaaacccaaaaaaaaaccttt

SEQ ID NO: 4632 - DNA, 222 bp, Homo sapiens
aaaaacgtttatgatctgaagatatggcccaaatcaccaaccacgcaatttgttttctgaggaaaggaaagacctggtgcaactttatacaaagagcccatcattcatccttgatcagggatattttctcctcccagccactaatctgctctctgctcttacatttgtacatttttagaacgatattaaacatctgaagagtcattcagggaaaaaaaaaaa

SEQ ID NO: 4633 - DNA, 328 bp, Homo sapiens
  misc_feature 37, 38, 76, 99, 105, 121, 128, 139, 151, 166, 170, 296: n = A,T,C or G
aagggaaaagaaaaagtggagcacagaaatgaaagannggatcaaaggaaaagaaagggaaggataggtgttctgnaagtgcctacctggttcaacaangagacngctgaaatcaagccantggaggngtctgagccantcagagccttgngcttgctctgacccncatnctctatccaacatgattatggttcatgagaccttagaccaatggaagttgccttccaaagccaaatacaggagcatgagataaagctgtgtcgtgatggaccgcacccatccttcccactctgtgntctttttgtcctgctttattgttggggtgagg

SEQ ID NO: 4634 - DNA, 463 bp, Homo sapiens
  misc_feature 17, 19, 38, 43, 49, 51, 53, 69, 70, 71, 75, 76, 84, 86, 100,124, 128, 147, 203, 291, 416: n = A,T,C or G
gggggggaccttccccntngctttttaaaagttccagnaaacntggaananangggggggggtttttcnnncccnnttgttttngnccccaagggccttngggttctttccgaagccttccctngaanccttcaaaagttggaatcntggcccttggccctttcgggcccctccccaaaaagtggcttggaagaatttaaccngggacattggaaagccccacccgtggccccaagcccaacaagaatggtcattctttggaaacaaaggaaggaaaacccaggaataccnaaaaggaagtaccattcaaatttcttttattggaatttccatttttattaccaaaaaatttcaaggaaaaaccaagggccaaaaaacccaaatcccttggggtgggggtaaggaaggggtcaagnacttaaattaaaaaattggcccttttggggtacccaaaaataaaaaa

SEQ ID NO: 4635 - DNA, 139 bp, Homo sapiens
  misc_feature 20, 23, 26, 72, 102: n = A,T,C or G
gggcccatccccattcctanggnggntgaagtcacgcatggaatttcccattctccccatttgggcccaaangcccgattgggccattcggtcttcaaaaancaaacttttttggacttggggaaggaagaaattcacc

SEQ ID NO: 4636 - DNA, 293 bp, Homo sapiens
gatgcttccagccactcagtttactaatctggagagatgattaatgtcagagactctaaaacagtaaaacctcagacaccaaattagatataaatccatctgggtaatataaggacttcacgtataaaaaccagatggaagtttggatggattttctctgtgctatatgaggaagaaaggagaaaggaagaggaggagcaacttctaattaatttaaaattccgcagtgaatccacctctctatgtaattaaaaatagaatacaatactacttcaaaaatattaaaaaaaaaa

SEQ ID NO: 4637 - DNA, 156 bp, Homo sapiens
ggagacttggcaaaaagtcagcatcaggaacaagaggaacaagatgacctgctttacccgatctgaagccctgcagaggtggactttcttcaccccaaaataactctcatctttagcttgataataaaatgaaactttagaacaaggaaaaaaaaa

SEQ ID NO: 4638 - DNA, 150 bp, Homo sapiens
gcctatatggctgatgctcagtaagcagtgagatgagctgcaagatgagtcaggagccagctgatatcagacctttgcaggacacagaaagatctggattttatcctaaatacaaggagcgtccattaaagaattttaaacaaaaagaaa

SEQ ID NO: 4639 - DNA, 310 bp, Homo sapiens
atgttctatgcaggtcagctgggatcatgttcctgctttgtcatcatcctcactccaagattcaagataacagagctaccactgcctggaatatcactggtcacaatgacacaggaaaaccacccactgcttcttaaagcttttgcctgatctagcatcatacttatttggaatacactggatgtaagaaaaaagaagaatgtccaatgccaacactattgttaacattatataaaaggtactaaccaagagaaatataagagaatgaaaatgagagttaaaaacgtacctaggcataactaaaaaaaaa

SEQ ID NO: 4640 - DNA, 120 bp, Homo sapiens
atgaatggaatcagaacttcatggcacttgcagaaaatacccacttaattttcaagaagaactctgtaaaagaatgcttatcaacttctccagaataaaaattgggcctaaaaaaaaaaa

SEQ ID NO: 4641 - DNA, 389 bp, Homo sapiens
aatctaccaaagttgtcttcagcttccacacttggcgaaaatctgaccttcagtctcagtctggaaagctaaagagcaggatgcattcttcaaatgtcacttctggcatccttgaactgatgtatgatcaatgattgcatcaccgtgtaagtaaacatcacaacagcatgacgtcagtgatatgaacaaggcattatatttgaatatctgccgttagtatccaaagactcattttcaaatgtcggtgaacattccagatgtatcctagaatctcctgcatccatcagcaaactatatgacactcaagattttgtcacgtacttaccaaagatgttcaaagatggaatgtctggttattatataacaaagctcagctctaaaaaaaaaaa

SEQ ID NO: 4642 - DNA, 334 bp, Homo sapiens
aattaacagtcaaaatgaagcaggataattggagacggagccatgcagccgatcatgccatccttggaattattgggcacaccatcatctcttgcttggattcaggatcttggcattgcattcttacagaaaagcctctttgcagtcaacatccacagaaaagaaatagaagcaattgatctgcaaggacctgcctttgaaatattgacacattgaggatttgttcatgtgtggatgtgatggaactgaagtcgctaggttcatgctacctggaacatgagactgtcaaatagaggagcactgagtcaaatgaatctcggagaaatggagctgg

SEQ ID NO: 4643 - DNA, 139 bp, Homo sapiens
  misc_feature 25, 32, 36, 42, 60, 72, 74, 82, 94, 109, 110: n = A,T,C or G
gaaggctccacccacacttacttgnctagagncagncatgcnggcacagcctagtgcaanggaggctgggangngtggtttnaggataccatgngaatgcaggaaatgnntaagaaaaaggggacctgtttgtgacatt

SEQ ID NO: 4644 - DNA, 344 bp, Homo sapiens
  misc_feature 324: n = A,T,C or G
gtctgacaaacaccattttcggccacagctgctgtcagttcaaaagtttggctctggggtctgaagaccaaagtctgtccaaggctgatcaccttctgagaaagactcttaaattctgtgaagagtctccagcagaggagacattggtttaaaaaagcaagaagaatcaccacaatgcatgcccactccacattaccaagcctgcacaactcatgttaggggatgtctgctgctcctccagctttctcccctggcaaatacagtggtggtccctgagtccccattagggcccaacagcaggaccagtagcagcccctgtcaganaaaccacagccaggtgggga

SEQ ID NO: 4645 - DNA, 326 bp, Homo sapiens
  misc_feature 21, 22, 24, 26, 31, 53, 89, 97, 103, 106, 112, 122, 126,133, 146, 151, 158, 184, 193, 211, 217, 222, 229, 271, 284: n = A,T,C or G
caaccaccgggcctcagccannangnacggngtggcacacggcttgccttacncaccagatgcccattctcttacaagttttatttggnccgttaanaaacangantaagtnattggttggntccntctttantaaacctttttanaaaanaattctnttacccctttttggttagcaattaantccttggcntttcaatcaaaattggantggggnttttncccaaantttttcaattcccaatttgttccccctttaccaaaaaagggnaccattgggaaancttcccatttccaacctttttttttaattgggggctttgcca

SEQ ID NO: 4646 - DNA, 339 bp, Homo sapiens
  misc_feature 23, 36, 43, 44, 50, 86, 105, 108, 109, 112, 113, 119, 120,121, 126, 127, 130, 132, 134, 162, 179, 199, 206, 278: n = A,T,C or G
ccccccccgtgagggtcattggnctaaacatctagngtttggnnacaggncacaccacctaaagtttcctcctatgtgccacctgngggatcacccctccacccnttnnccnntttgannnggccnnaancntntgcttttcaccccccacccatcttgcanatggggtgggcgacctnttttcaagttctttgggatnggggatnaaaaatgggttaaaaaaaaatcaccaaaccccggaccacattctttaaattcaattccccttatggattttnttcaaacagggggaaaaaaccgccttaccctgggttatttgggtcaaaaaccttttttttc

SEQ ID NO: 4647 - DNA, 515 bp, Homo sapiens
aactacagtctggggcagcaagaaggacccctaaaggtcactaagagtacatagagatggagaaactgaggctgagagaagcgaggagactctcccaagactccaggatgcatcagccaaggagcagagaccagtgccctgatgtccgacctgttttctgtccactacggcatggggtcctggcctcactatctgtccatgggctctttctctccattagaggtgaagccctggggacaggatctgcactttctacagaacccacagaagccatgcagaggccaggcctttctcccccgcttccccttcctctgcctccgcctctgctctccctggctctgagtgccgcggaccctcctgcccctcctgccttctgcttgctggcctggcctggctctgccaggccctctttcagcacctgcacccctgcagctttcaactgttggccaagtgttgtgctgtcaccaaagttcgaaacgtggctacactattttctcttggtctgcccgctttcc

SEQ ID NO: 4648 - DNA, 372 bp, Homo sapiens
tctatgcagaatgaaggaagtgccagccgttagagcacttctaaattaaggagccagtggcaccaacacatctgagagctgcccaagataaagtgacgcatcccagataaccccaaaggagaagctggcacgtggcagacaggcacccggcacctgcgactggagcacacgtgtcatctcagagagagtgcagctgcaccgagtgtatcttttggattccttcacttgcattggccacccgtgagaaggggagtttacaacgacccggtaaacccctccctaagtgactgtggaccccctgctgccctgccctggccaaggagacaaggaccccgagaaagggatggagcaggattcaggggcgttatcatc

SEQ ID NO: 4649 - DNA, 326 bp, Homo sapiens
  misc_feature 257, 292, 297, 299, 304: n = A,T,C or G
gtcttttgctctagttccctgggatcatctccatgaaaatctagatgctcataagtgctttacttcaggggcttttatggaggagtcaggggatagagaggcaagcccgccatctgctaagtcccaagtctcaccaagagtgtgaaaaacaatgatagcacttaattattgcccacttccaagatgtcaggtgaggagactgagactgaatcaacggagaagcagaggaacttgcccaaccaggttccatggctcanacttggtaaaactggaatttaattcaagcgggcanatttngntctgnccccggaaacatggcctccaca

SEQ ID NO: 4650 - DNA, 434 bp, Homo sapiens
  misc_feature 340, 353, 356, 403: n = A,T,C or G
gctccagtccctcatgaagacattcattcaacgaataattcactcaactacgtgcaggagacactttcatagatttacactctgacagggaaagactggccaggtccacaaatgacatcatggcagacacacagagcacgggccaggcactcagggacccgcaacctgttcacgggaatgacaataagagacagagccaaatctggtgaagcaaactcattcaggaagactggcaggagggaccagccagcctccgagagaaaggatgtggatggcgtgtcacagtgggaagagcctgggaccagggtctgaaggccactgcaaggggacccttggcaanttacttgtcgctnaanccaaggtttttttttccataaatgagggactggaaacagctgatttntaagttcctttcaggtttcatgatgaagttt

SEQ ID NO: 4651 - DNA, 514 bp, Homo sapiens
  misc_feature 478: n = A,T,C or G
aaattccaagtaaggagatgatcacccaggaggctctagacactccaatacttcctgaccacctaacccacagcacccacccgaagcttattgcaacaggtccaggctctgctgatgacaaagttctcagtctcttcttcctgctatcttcatgcccccacccactcctcactgaaaaaccttcccagagtcccctcccaagcacctactcaaccagcagcaacataaacccagcacagatcctgcaccctagaggagcaccgttcaggacaggctttagggttgaagtggcaggatgtgacagaggcccagtgcagatggaggaatcgacaataggaagagggatgctgctgaagatggctgcaggggtcaagcaaggtgaatggggaatgttatgtgctgggcagtaggcaaacccttctgcttcctgctaggacctacagtgatgacaaccgtgtgtatactggccctctatggnctgcatgtgccatggcccactggagccctctagggc

SEQ ID NO: 4652 - DNA, 365 bp, Homo sapiens
gcaccaagaaaagcctcattgtgggatctcctcttgaaggtctttagggctctcctggggatatgcctttgctgagcccttcctatggggacagccctacaactatgcccaagtctactgggcagagaccaccccacagcccagaggcagggcacatttgtctccccattgctaatgcctgaggatggaaaaagcaattctctccaaaggtcctgagccaaagggtcttcatgatggagtccctgttggttctgtctctgccatgcccagcccagggtacactcagaggtggtcccagtcttcaacatgctgatctgcaagcaagtgcctactgctgacacaaacaactgttatcacagaaagta

SEQ ID NO: 4653 - DNA, 199 bp, Homo sapiens
  misc_feature 36, 53, 69, 75, 85, 108, 115, 119, 130, 138, 151, 157, 164: n = A,T,C or G
ctggggggggaggcttaccttggcattttaaaggtncaggaaacttggagccnttttctttttggaatnaaatanttttttcatnggggaatatgggtcaagggcttnttggagncccnaagctttaagnccatttantattttcccctgngggggncctgggncgggttacaattttataaaaaggggcccgggaggt

SEQ ID NO: 4654 - DNA, 372 bp, Homo sapiens
  misc_feature 307: n = A,T,C or G
gtgttttgtggctgtccatcgggggcgaggtcctggatatcgttctgatactgacaagcgccatcctcctgggctccagagtgagttgtcgcagccctgggttccactggctcagggtggatgccttggtagccatcttcatggtgctggcagggcttctaggcatggtggcccacatgatgtacacaaccatttttcaaatcactgtgaaccttggaccagaagattggaagcctcagacctgggactatggctggtcatattgggaatgaaatacactggagagagacttcgctgaattcgctgntgtgaaaaaacacctgtgaacactgtggctgaggatgccaaagaagaaataaacttttaaaaact

SEQ ID NO: 4655 - DNA, 148 bp, Homo sapiens
  misc_feature 75, 91, 109: n = A,T,C or G
cctgggcttcaagcaatcctcccacctcggcgctccaaaaggtgcttggggatttacaggcggtgtagccactgntgcccagccagtcaanggacttttttgaacaatntaaatggaattgttatttcattatcccacttcccttgga

SEQ ID NO: 4656 - DNA, 320 bp, Homo sapiens
  misc_feature 21, 22, 41, 43, 71, 75, 79, 223: n = A,T,C or G
tagaactgaggctcacagganncaggaacacaagaaaatanangacagatccaggaaagaggaagaagagnggcnaggnaggaagttcaaagaactggagaaagggtggggaagaaagaggatctcccaggtctcaccttgcaatatcaagtttccttccagaagtgaagttaccatcagctgagagaactccatcctgggacatatccgtgcacatactggnggtgaagaatgaagtctcagttttgtgtcaatgaatggcctgggacttagaggtttaagccacctcattaaagttatgttaactttaaaaaaaaaaa

SEQ ID NO: 4657 - DNA, 117 bp, Homo sapiens
gtctaaagatgaaggctgacatttagagcttgtgaatacaacttccacctccatctgtaagcagaaaatagttcattaaataaaagtctgtcggtagtacagcttgaaaaaaaaaaa

SEQ ID NO: 4658 - DNA, 417 bp, Homo sapiens
atgaagacgccaaggcaatgacacctgacagtcatatagctgataaggaacagcgccaggacccagagccaggcagtgtgactgagcaagagtctgtgcttttaacaactaggttttgctagcccaaagcacatatttgatacacgtcacaacaaggaccctgagcacatgacagggtggtggattctgggagttcattccctgagcacctactatggaccaggaattggactagattctgagaatacagtattcaagaaaacatatatgacacttgcatacttcaagcttgtgatccagtggagaagagaaacattcaaggaacattaacacaatggtatacattacaaaatgtggtaagtgctacaaacaagatgctatccaaaataaatgaatgagtaaaatatttaccacagg

SEQ ID NO: 4659 - DNA, 509 bp, Homo sapiens
  misc_feature 461, 471, 484, 488: n = A,T,C or G
atgacctcagcaccgcccctcctgtgccagatgacggaagggtcctggatcctcgtgggcatggctgttcaagggagccgggagctgtttgctgccattggtcctgaagaggcctggatctcccagacagtgggagaggccaacttcctgccccccagtggctccccacactggcccactggaggcagcaatctctgccccccagaactggccaaggcctcgggatccccgcatgcagtctacttcctgctcctgctgactctcctgatccagagctgaggggctagggtcccagcaccacttcccccttctccaccctctacttcccgcccagtggggctggaatgtggcccagccggctggaacctcaagggccccacccaccgagattgcaagcggctctggctaattgggcctcagtgcccgggctattttgaacccagggatccttgggggtgggnggaggagcgngaccaataaaggnggtnaacacaaggccaaaaaaaaaa

SEQ ID NO: 4660 - DNA, 243 bp, Homo sapiens
ggtgaggaaacagacagcactaagagaaaaagctggaactcaaaaccaaattaactccaaacttaagttttcccacttcgacaagaaaaggaactgcatgtgtttttctgcctcttgcagatgtatgtcataaaagttggatgccttcctttcaagacatttgaatggatcaccaaataattacctacttttctctcacaactcagataaataattaaaaggagatatacacagaaaaaaaaa

SEQ ID NO: 4661 - DNA, 302 bp, Homo sapiens
  misc_feature 17: n = A,T,C or G
gacactgtgacggcctngcggcacagaatgcggcagaagtacagtgcgggacttctggagatagatgataacagacggcatagcttgctctgctcttgctcttccgggatgcttgtgctgggagcccagatgccataccgtgagaaagcccagactgatgtggagaggccacagtgagaagatcgtacgaagaagaactgagtccaccaaccaaaccagcatcgactgccaaacgcgcaggcgagcgagccttcaaatgattcaagccctaagcctttgagtcttctgctgagacctcaggc

SEQ ID NO: 4662 - DNA, 477 bp, Homo sapiens
  misc_feature 384, 397, 414, 435: n = A,T,C or G
attctgagctccatgagataagctcacatctctccagcctccctcatgggcccaggagtattggctcggctccttctagaacagctcacattttttggacagcttctccaacctactccacccacatctatctgctctgaatctaacctaggactccatgtctcagtcaggttcaagatgaagtggctcctgctgcagaccctgatcaacacccagacttttcatattcagaaaatcaaaaccaggtcacagcttccaggagtctatccagcttctgctgatcttgctcagaggactgactggcccacaacatctgctcccaggtcagaccagggtgtccacaaggcaaggtccaggatatccagccgctgtccaccacaatgngaaggggatgacncaggaagaaggaaattngacacccaaagtgacaccacnggctacagatgcataaaggaacaaccatgtgaagacatggat

SEQ ID NO: 4663 - DNA, 399 bp, Homo sapiens
  misc_feature 21, 26, 42, 46, 48, 64, 70, 81, 82, 90, 92, 95, 105, 116,133, 139, 146, 175, 193, 251, 282, 299, 327, 352, 360, 364: n = A,T,C or G
aagggaggctttggttttgtncccanggctgggaatggcaanggcncngaacttcgaacatttnggaacnctctggtttcnnggggtaangnganttttctggtnaacctccttgngtggtcaagcctttggnacgccnagctaangccattcatatttccctggtgaactggcncatattacattccaagangggggctggaaataacttgaaggaaatcacaaaaagaaagtggaaaatgggccttggntcctgccctttaactggaagaaattaccttngggaaaatttctttttngctggggttaatctgggttaaaaacttnccgcacttggagcaccctttgtgancccctggncttntggccggccaaaaaaacaaccccctcttggactgg

SEQ ID NO: 4664 - DNA, 143 bp, Homo sapiens
cgcctggctgccaagatctttggggattgatgaaccaaagtgaagtatgatatatccacagggtggaatactatggacttattaaaattgacatggcagaataatgatgctatggaaagatgttcatgctgtaaaaaaaaaaa

SEQ ID NO: 4665 - DNA, 509 bp, Homo sapiens
  misc_feature 413, 476, 478: n = A,T,C or G
gtctggaggctgggcatctgagatcgggaccagcatggttaggttctggtgcagcccagagcagcaggagctgtgccctggcccctgtcctgaggagctcccactggtcagccccgcctactccagctggaccttgatgcttcacacaaggtgtgcgcagaggacacaggcacttcatggagcaacatacttttgtaaaaaaaatgaattcccttgtaacaaatagagcacggaggcttttatagattaagtaatttgtagtcttcttataattatggcttctaaattacctaaaataattcattcaaggcttgattttagttttgtcttgagagtgtcaactctttaacttgagatgctgtaggatgggggtttcatcttgggattcttttctttggatatggcatttaaantctgatacttatattccctatttgaaaacacatgatcaatgacaataccaatacctgatttgngngcaatacttataatttacaacgaaaaaaaaa

SEQ ID NO: 4666 - DNA, 337 bp, Homo sapiens
  misc_feature 308: n = A,T,C or G
gcttatagggtttccctcacaaatattcaagcaaacactcaagggaacctcgctggagatctctggaaccctcctactgctcagctcccacctttcagggcatcccggcgactctttggaccagttgaaccaaagaggatagaggatgaagtccaaattggtaatggactccaggaatctttgttagcagctcttggaagaagatgggaggccaaccacacttttctccgcttattgacgacacagttcaaatcatcaggaagagacattatgggtctacaggtctcctgggctgtgagcagagtcgnagctggcatctgggagaaaaaagaaagaa

SEQ ID NO: 4667 - DNA, 348 bp, Homo sapiens
ccccggattatgcgtttcaggcgtatggaaggaaggaccgacactctgcttcaaaacctctacatgcctcaacgttcccatttgctttacacgacaaagtcctcatgggccgtatgccagacgtcctgcacacaaacctcaatccgtcgcagagagctgggggcgtcagctggaagtggattacactctccttggcacaaacgactcaggccacaggcagccggtggccttcccctgttaactatggagacaatccctaggcgtccttctccgcccagagctagaaaaatttcagagtcctgatcatgcactatcgctcgaaaacaacttccgtgaaaataaaaaagg

SEQ ID NO: 4668 - DNA, 174 bp, Homo sapiens
  misc_feature 17, 19, 42, 74, 93, 95, 111, 114, 123, 129, 148, 156: n = A,T,C or G
cttctccaaagctcatntnttggtggatagggaccaacaagnggggccctcaaagctttctcccagccagttancaagacccaagatcccggntntcaaaccaaaaccttnggnaacctctcncaaagnccctttttccctgcttgtngaaacctngatttaatttttgggcat

SEQ ID NO: 4669 - DNA, 129 bp, Homo sapiens
  misc_feature 17, 22, 40, 52, 67, 70, 85, 90, 113: n = A,T,C or G
tatacatcttttatctncttgntctatccctcactccttncctcagctctanggggattttcactcnttnacgttttttagtacncctcnccttaggttctatttcccctccngggttttgaaaaaccc

SEQ ID NO: 4670 - DNA, 295 bp, Homo sapiens
  misc_feature 38, 53, 122, 164, 166, 182, 190, 205, 207, 211, 212, 220,222, 226, 245, 259, 270, 275: n = A,T,C or G
agggcaacacgacgtccaatgaaagaactcttctcagntgaggaccataccanccagctttgagtggacctagcagatggtcacagccacatggacaaccctagctcagctggtaattgaanagccacccaactgataccagctggccattggagtttgagcanancagaaataaggagagngtcttggnccagtagtagatttntnctgnntccggagnantgtntacttgccctctgccaatngggacccctgcagntttaggtgtcnccagncacccccattaatgcaaagg

SEQ ID NO: 4671 - DNA, 116 bp, Homo sapiens
  misc_feature 29, 46, 57, 58, 70, 72, 75, 77, 80, 84, 95: n = A,T,C or G
tattcttacctctcctcactcctattccnttatttaactcttttcnctttatacctnntatctctatccntnatncntcnattncgccattaacncacccgcatattacccatatt

SEQ ID NO: 4672 - DNA, 325 bp, Homo sapiens
  misc_feature 17, 30, 38, 43, 45, 97, 109, 137, 142, 153, 165, 173, 176,179, 186, 190, 196, 202, 204, 209, 222, 247, 254, 259, 273,295, 301: n = A,T,C or G
gggactcaaaattgcanctgtcttctttcnggggatgnctcangnaattgaggaacaatggacgcaccacatagctcaacatcctttccttaaccangtagggcacctnattcacttctcggaggattggaaggagnaccanggaccacggtnggggacctatangccattgnagncangcctacnacgntggtcnccttcngnaaacnccccaagcattgnacctttccctggataccaggtggtnggggatngaagnatagggattaccanggggttggattaccctaattcnaaaccncaaaaaggccaccccccttgaggt

SEQ ID NO: 4673 - DNA, 365 bp, Homo sapiens
  misc_feature 337: n = A,T,C or G
tatgtcgaagttcaccttcattatcaggatcaagatcttggtgtccacgaccaggatcatgaccattacgttctggaagatgtacatgagaatgacctgggttatgtacacgatcagtttaacatcagattgttcctgggttttattggtctctgttgaaggttcattgctaggctccccacgctcactgggagtaatggaatcattatgaaaatgcagcttgctttgaaaatttgcttggctccaattctgtcattccacgatgctgtctgtgaagcgcttcagggccatggtcatgttcttcatggcaatggttgcaatgatgaaaaataaatgncagcaaacaaatgaggcaaaaaaaaaaa

SEQ ID NO: 4674 - DNA, 354 bp, Homo sapiens
cctgcaaaacagactcgatggctgaagcaccaccagcgaatctggatcatgatgtgaccttgaaaatgaaagctgtgtgctgtgtatggtaggatgaaaacatgagactgagtgctcaatgacaacccgaagataccataccatttgtggacagcctacctccagatttcctttacctgagagaaatgggagagaaaaatgctattttgttatttgttgggagaaaagcattgttctatgcagccaatcttacttgtaactgatacagcaatataacttcctcaaacaattcttattaaagatattattaaaacttattaaagataatgcaactcagggcatgagtaacatatc

SEQ ID NO: 4675 - DNA, 145 bp, Homo sapiens
  misc_feature 28, 36, 38, 42, 53, 92, 109, 123: n = A,T,C or G
gccctttgaaatggtttctatcaaaacnagagaagncnagancaggagccagnacttgtcttccggggaccagaccccccaccacagtagangtttcaaaggaaggagncagaaggaaggagntgaaagaagaaaaagaaagaaa

SEQ ID NO: 4676 - DNA, 127 bp, Homo sapiens
  misc_feature 110: n = A,T,C or G
tttggcaggggaccaaaaacctgaattaagtcacgaggaaacaccaggcaagcccaactgaagaacattctataaaacaaccgatttgtgttctttaaatatatcaatgncatgaaagaaaaagaaa

SEQ ID NO: 4677 - DNA, 466 bp, Homo sapiens
  misc_feature 418, 419, 422, 432: n = A,T,C or G
ggaggcagtaccaattcttcatcttcaaatgagaaaaggaaggcttgaagaggaaagagatttagccaatgtaccccagttaacaggtgagagaatctacaccaaagctcaggcctcctgccttctgactctctttcctcttgcccgggctgaaaaactgcctgagcttctgcctgtaatgagctaggggctgggattcaaacttgcagtgagccacttgcagctgtcttagttggcaccgctgtctgccagcaccaaacatctgcctaaatagcggaggggatgtgaccggatgttgccaagagcctctgcagaggtgcaaagtgcagcagcatcagatctctcataacctacctggggtgggacctgggggcggggactgggtacatggagctgggtgagagggggttgttttttnnctnccaaaactgncagagaacatagaaaagcccttgagggtcccaga

SEQ ID NO: 4678 - DNA, 124 bp, Homo sapiens
  misc_feature 24, 59, 60, 61, 63, 67, 74, 93: n = A,T,C or G
gattcatgaaatctcggaagcctnaaggccacagcccagagccccagaccctgatgaannncnatanctttttnccctctgatgacatggaangacaaggtttaagggtggcgtcactcgagca

SEQ ID NO: 4679 - DNA, 214 bp, Homo sapiens
  misc_feature 63, 64, 84, 106, 152, 153, 156, 157, 177, 188, 189, 192: n = A,T,C or G
catgggcggtttttttactctgtgagaaaacgatacaatacccattttctccgagtgaaaacnnactgtctctacaaagaccangaggaaggattccgccggcctncagttcgccggcctcacctactacatgacatgctgaagctttgggnnacnnccagggaaaaccttcacaanaaggggggggnnctnggcttttggaaaagcctccccg

SEQ ID NO: 4680 - DNA, 320 bp, Homo sapiens
  misc_feature 18, 49: n = A,T,C or G
gctggatggactcccagnaatgtcctggactgcaaggggaaacatggtncctatgggacccaatcaagaaaggtggagctcaattttttcttaaaacaatctggtggtttggcccaaccaggggcccaccacccttaaaaggttttccttcctatgggcccacccttggtgggatcaacccttggccctttcaaaaggcttggggtaagcccaaaaagggttcttggcttcccaccccccacccattcttggcaaaaggggggggccaccttttttcaagtctttggatggggattaaaaattggtttaaaaaaaaaatt

SEQ ID NO: 4681 - DNA, 125 bp, Homo sapiens
  misc_feature 18, 64, 82, 104: n = A,T,C or G
ttttccttaccaccaatnaactttttccatgcatgggactgccttgctcctttttcccacaaanatccctaaggccccaacnttcaaggaggagaaattttggnggggtggttatcccacctcct

SEQ ID NO: 4682 - DNA, 256 bp, Homo sapiens
  misc_feature 117, 119, 157, 163, 169: n = A,T,C or G
caaagctacagaagaagaattcaaaaattaaaaagctggattttcatctattgaatcacaaaactctgacactattattcattggaagagattaccatggttgaattctctggattnanggccagcagccaaaatactggagacctgaaaagggatnactgcntttggnctcctacagcaaccgataaatgtaatataatatttacacaagtcaatctaatagcagttatgctgagcaccatccaatggaaactgg

SEQ ID NO: 4683 - DNA, 200 bp, Homo sapiens
  misc_feature 19, 23, 37, 52, 55, 56, 60, 62, 66, 75, 78, 82, 89, 90, 107,119, 157, 173, 176: n = A,T,C or G
taaaaccccctttatattnattntaaaaaattcccancctcttttgtagacncgnntcancnctancgttttaanttnccanagccctnnaattgcgctctcccctntgccacaattcntttttgccttttttaccctggtaagtaaaatacctcantaagaccaccctcctnttnatttttacccccaatcttcacaag

SEQ ID NO: 4684 - DNA, 109 bp, Homo sapiens
  misc_feature 87, 92: n = A,T,C or G
aagcaaaacatcgcatctttccattttataggacaatgccaactcctgaagatcttgctctaagtggtcaaagggtgagcatactgnaggcnacaaaaggataagcctt

SEQ ID NO: 4685 - DNA, 395 bp, Homo sapiens
  misc_feature 22, 33, 44, 66, 88, 106, 109, 117, 127, 129, 136, 147, 149,155, 156, 170, 182, 201, 210, 248, 257, 258, 262, 288, 290,296, 298, 303, 307, 310, 327, 342: n = A,T,C or G
tgggagctcctgcttaaatcanaactgaaaatntacattatggnccgttgtgctgtcatccgggcnggaagtacaatggagtggactnagcacactgcaagctaanagntttcatgntgacgcaaancntcctggnttatggggacnanagggcnnttactacttggctntgaagccaaacnggaaaaaagtccctatacntaccagggntgggcattcaaccaaaatcatgttgtcccaggaacacncactgcctnnctgngcaccaagctacaccagctctggggncnaaaccntnggaanttanatntttgccctttaaccacngtggaagttttcggntttttttttggaaaaaaaaagtcttttgtttggccaaggctgggaaatgccaa

SEQ ID NO: 4686 - DNA, 118 bp, Homo sapiens
  misc_feature 31, 35, 55, 56, 58, 73, 78: n = A,T,C or G
acatggacttggtgagaactagtaatgcagntaancttcatctatcttggcatgnncncgatgttcaactggnagggnctgccttaagcattgtgttaagaaagattctgaggtcaca

SEQ ID NO: 4687 - DNA, 349 bp, Homo sapiens
catcaaaaaagttttttatcctgtttcttcgggctttgttcctctttcctcctctgcatgatgaagactggaatatagatggactaagacagaagccatgttcaagtttccgatctacaactgactcagtttttcccttgagcacgtaaatatgccaaatttttaggattcaaactgaatatttaaagaaatgtttcttctttgcaatcagaaaggatattttatacaatgtatgggtgcagacaggaagttttattattcactttctcttgtatcaagagaaaccacaacatgagaatagtttttccccctgctttattgaggttatttgacaaataaaaattatata

SEQ ID NO: 4688 - DNA, 335 bp, Homo sapiens
gcagaaaagataaagaatggaagccctccctccaggggtgcacaccagccaagggaagagatgtgtattttgtctctgggacccagtcaacaaggcctagtgcatgtcaggctctcactgatcagaggggcaccaccgtctcccatggagaaacttgaagaaggactagagagaagtgcaagctgtcttgccagcacttctgagtcattggtgggggttcctacactaagagcagaagtaggaacatgggaaggggaagagagagcttcccctgtagtaataaaaatttaaaaacggcctccatgatgataatccaaaaaactgacaagaccaac

SEQ ID NO: 4689 - DNA, 352 bp, Homo sapiens
  misc_feature 255: n = A,T,C or G
gaaggaagataataggataaatcattaattaaaggggctgcatacgggacagatggaattctaaccatgtggacacctcccccaacggtggaggggtaaaaagcaccataaatcactcacggtccagcagtcttcagtagggcccatcttgccccctacaagtaatgataaacaacatatacttccagtgcagcccactgggtattctaaagtaggtgaactatgagataacacatttatccttcttgggaaggnatctcttcatatttcacatggcgcagagaaagcagacccaactgaatgacaactaatgaggattaatgcattattccacagaggattatgggctctt

SEQ ID NO: 4690 - DNA, 464 bp, Homo sapiens
  misc_feature 19, 36, 41, 64, 69, 78, 82, 98, 105, 123, 130, 140, 142,143, 151, 154, 168, 170, 179, 188, 192, 202, 204, 219, 251,286, 291, 297, 299, 303, 308, 314, 315, 319, 326, 338, 344,347, 348, 370, 400, 417, 430, 447: n = A,T,C or G
atcccatttaggggaacangcggggatgccaaaccntttanggaagaaaccccgcgccctttanggganccgtagatngggncttgggaaaaatcccnggctggnttggtttatgcccttggncccaaangggaggttcncnnttgcaacntgnttgaaaccccattnanaacaaattntttaaaaantttntgggctctgngnttcgcaacaatgccntttgggaaaattaccgggtaacctcccagggnccttacctgggaagggggattattggaaatttctngaggnggttcncntttnttccntttctnnctcnaattttngggaaaggaacncccctngcnncaaatttaaaaaaccccctacntttttctttcttgggcttgggcattaaatncttcccaaaaaaaaggnccccgggaaaaanggggcccccttggtttnttggaaaattcggcgtt

SEQ ID NO: 4691 - DNA, 169 bp, Homo sapiens
  misc_feature 138: n = A,T,C or G
gtctatcatggcagaatttgtcccagaacataaaactacagaacaccccagtttcggtgtgagaaaagagcctaggcatctcctaatttaatgggcttcaaatgggtttgggctcagttgtcctaagccaataaaaanattttgaggtatgtaacctcaaaaaaaaaaa

SEQ ID NO: 4692 - DNA, 358 bp, Homo sapiens
  misc_feature 27, 40, 59, 68, 69, 83, 87, 111, 116, 151, 167, 197, 200,204, 216, 218, 245, 251, 258, 270, 288, 291, 294, 297, 309,332, 341: n = A,T,C or G
tggatccgggaaggatcccccggatgnggtcccagtttanacggcttcacttggcccangatggaatnngcaaggtggtcttnccangaaagaaagttggaaattttgccnaaagncaaggcccattggttttttcaaggggcaccccaangggattgaaaggaaanttgggccctccgtccaaatattggaaattnggnttcntttttttgaaanantggagggggattttggaaccatatttnttggcnttttaanaaaaaatggggngatggggagggcggcccnttnccncgntaatttttcaangggggaagggaaatttttttttnaaaagccangttttcccaaaaaaaaa

SEQ ID NO: 4693 - DNA, 553 bp, Homo sapiens
  misc_feature 513, 517, 519, 523, 535: n = A,T,C or G
gccatcacacctgctcgttcacagaggaggcaaaaaaatgggatgatgggacagagatttccagagtccgtaatcatccagatggtgggccactagaaaagaccagagaaaatgtccagggttggagtgcagggatgagcccagaagatgacattgcaagcaatggctgaacctctgaagattcatttcgtctcttaagggtgtccaagtctctcctctgcccatcaggccccactggaggattctgaacccctctccttcagttactccttcaggtaactgcctgtagtaggttgaaatgtatcgcccagaaaagacatgtccacatcctaaccccggtcgctgtgaatgagactctgttgggaaatagcatctttatagatcataattaaggatcctaagatgagatcatcctggagatttgagacacagatgtgcagaggacagatgaggacagagagagattggagccgatgctgtcacagaccgcagaattcccagctctgccagaanggangngggncctgcttgtcanctggacttcaaacatctg

SEQ ID NO: 4694 - DNA, 196 bp, Homo sapiens
  misc_feature 17, 20, 42, 59, 60, 175: n = A,T,C or G
ggcccttattaaggaangangggaaaggaattctttttcttncaccccttggaagaaannacaccaaatggaggaaagggcttggcccatcttgccaagccaagaaaagggaagaagccctcgccttggggaagggtcaagccccattgccttgggccaccccttggatctcaanaactttcccggggccttccaa

SEQ ID NO: 4695 - DNA, 322 bp, Homo sapiens
taggaagaagtcacccatgactatctggaacaacattgtggggaaggccaagtttctggtcactctccatcttttccgccagtgcccaactgactgatctttacagatggtgtcaacagatgcatttaccctctggcttcaagttgagttggccaatgaagggaggcgctgcggaaagtacatgacatttgcagttgtgggcgactgtgctgtgggatgaaaccaggctcctcatcaagatgaacatagattcaagtctccatcttagccatttcctagttctgtgattataaataaactccttgacttttctgaaaaaaaa

SEQ ID NO: 4696 - DNA, 447 bp, Homo sapiens
  misc_feature 35, 45, 53, 54, 59, 64, 71, 75, 80, 91, 92, 93, 101, 102,104, 119, 121, 138, 155, 156, 161, 237, 252, 258, 277, 300,345, 346, 351, 356, 364, 371, 409, 413, 415, 424, 428: n = A,T,C or G
gaaactggaaagggccggggggctcccaaggcggnggaatgggangaacgaannttccnaactncacttgntgcntgganaaaaacctggnnnttcaaaanngnggcttcttaccaagnanacccaccagggttggangtggaagcccctgggannggagngggggggcccagctcttcttccttcccaaaaagcttcttttgcttttataacctttttctcattcttgggaaaggntttattggaaaaaanttcacnccatggggggcaatttttnggttttaaaatacaaacttcttncccccaccttctttggggcgtgggggggaaaacctttccttttannggaangcctnaaaagaanattccgnggccttttttaattttgggcccccacttggttgggttngggncntccaaccgncctngtaaaatccccccaaaccc

SEQ ID NO: 4697 - DNA, 280 bp, Homo sapiens
  misc_feature 18: n = A,T,C or G
ggcctatgagcagcctgntaccttctgcctcagtgccagagtccatgacaattagtgaactgcgccaggccactgtggccatgatgaacaggaaggatgagctggaggaggagaacagatcactgcgaaacctgctcgacggtgagatggagcactcagccgcgctccggcaagaggtggacaccttgaaaaggaaggtggctgaacaggaggagcggcagggcatgaaggtccaggcgctggccagctatctttgctattttgtgaggagattctaacc

SEQ ID NO: 4698 - DNA, 212 bp, Homo sapiens
  misc_feature 54, 131, 179: n = A,T,C or G
gtaactttgggctacttcatgatggcccagatgtctctgatcctgtagtgtggngccctagcctggtcaacgcttggagttttataaccctccatagcttcagtttcttcatctataaaaaaatcatgggnccgtctactagggtttgcaattaatctgggaaaacctttttcttcacnaaccaccaataaagaggatcaaaattaaaaaaa

SEQ ID NO: 4699 - DNA, 309 bp, Homo sapiens
ggcggtgctccaggtgtgaatggagacgacttcgagctcactgtgctgagaaactgcttttcagagggcttctacagagcccacaggtgagtgagcccctggaggagggggcagctctctccttccaaagctcttcctttatacctttctcatctgaagttatgaaattcaccatggtcatttgtttagtcactctccccactctggccgtgaacttcttaggagctaagattcggctttattggccagtgtggtggctcacgctgtaaccccagcactttagaaagcccgaggtggggtggattgctt

SEQ ID NO: 4700 - DNA, 307 bp, Homo sapiens
atgatgacaaggaggcccagggcctacaacaagtcagcagcatctctggaagcagaacctcgaactcctggcccccagtccaggatcttcccaccacaccacacactcatggatgaggacttcagctgggtgaagctcaagagctccagctttgcaggccagcatgcaggttcaaatcccagctctacctctcagaggcaggcaacagtggcaggtgactttacctctccacatcttatctcccattcaccttatactgaagaggaatgtggtgaagagaatcagaaagagggatgcttaaggaaac

SEQ ID NO: 4701 - DNA, 487 bp, Homo sapiens
ctgctcctccagctcggctgttccagtgagcaaaggaatctgtttgtctgagaaaaagaatgtggcagagaggcgggaggcagccccaggcagccccggcagcctcctcagcttcggagctcaccaaaaccagccagccacctcggggagtcacccaagagcctagatgcaggctacagacgggttggttactggttctgctctaaggactggcctgctggactcgctgcgcttctctgccagctgttccctcttccgccttctgtttgctttgatctgaggttgacagaccacctggcctgctaaactgggaaggtagtgatgcattttaggcaatgtcttctgcttatgctcagcaatgcatgagtctcaaagcggtggccagagaaatggcgaatcgtcgtatattgagcgagtgataatgggaatccaggaggtggaaattacaaggttgaaaaagtaaaatcaatgccctgactgtgaaatg

SEQ ID NO: 4702 - DNA, 115 bp, Homo sapiens
  misc_feature 19, 33, 34, 69: n = A,T,C or G
ctgatatcagtgaccaganaggtggacttccannacctgctgttatggtggcactcatcactgtcatgngcctgactaattacaggggtgccccaccccccttatacagaactgt

SEQ ID NO: 4703 - DNA, 479 bp, Homo sapiens
gtcctgttggcacaacctactgacaaccctacaacaaccaagggcctagtctcccttctgttttaagcccatcaagcaagaacaaaagggatataaacacttcctgttccattggaagtaagcctggaatgaagtcccaattccatgccgaggaaccagtgagccccaaaataaagcgatgtctccatatcacatcttgaatcacctccatttccaaccagattcagaatccaatgctcagggataagggagagcgtccagtagtttccactggcctcccttccgtttctcccttattgtctgtccctccaccaggggtatggcctataccagcttgtgaagagctggtggctaaacgttcaggaattttcagaggcgattgttaaatatagttattaaacaattaaatgatgtaacccttccactacataaactatattaaaacaaaggtaataaatacccaaaactcgaaaaaaaaa

SEQ ID NO: 4704 - DNA, 324 bp, Homo sapiens
gaaacagaacattaattgagcagctaccgtgtgttaagagaacctatcctcgggaattcataattgaaagaagaacatgagctgatggcaattttcatctaacgaatggatctcttacacatcccgtgatcatcaaagaaggagattttatgtgggaatgtcttctgagaacaaagcagaaaaaacactgataagaattactgaacatcaaactatggctcattgcactgattccaatgatattcattcaaaagaggtacctctaagtgaaaagaaaaacagattactttgtctctttcaccatacaactcctcttccaagtcc

SEQ ID NO: 4705 - DNA, 351 bp, Homo sapiens
  misc_feature 19, 30: n = A,T,C or G
gctctgggagctcctgatnagtagaactgnattttaaacgacgactacatttgtgcgtgggacctggagcagacggtgaccaaactgacgcggggggagctgagtgccgaggaggtgagcctggtatgtgagaaggtgctggatgaggctgatggagaccatgatgggcggctgtccctggaagatttccagaacatgatcctccgggcaccagacttcctcagcaccttccacatccgaatctgatggcaccacagaggagccgagctataggagggcggggtgacccctcacccgctgtggactctggtttctgagaataaacacaagtcactgagtcaaaaaaaaaaa

SEQ ID NO: 4706 - DNA, 472 bp, Homo sapiens
  misc_feature 46, 244, 340, 366, 368, 375, 399, 409, 410, 419, 421, 451,454, 455: n = A,T,C or G
gctggggtatgtctttatcatgcagcatgaaaatggactaatacangttggaaagttaccaaatctgcagagtctacgaagtttggattggtgcagtccctggtctggaggaaaccactgggagtccccttgtactgcctttacttcttgtgggtgacctgtccaggggtggaaggtgctgcgtctacaggggtccccaaggaccaaggtgctatccatctccctgttcatctcccagagtggnatactcatccagtgcactcatctggagcaattcacatgcaccatgtctacattccagcctgtgggaaagcaagaaaggatgaccaggacacacggngcatcaataagaagatgactataagngntggggtntcattcctctcactttccattggncccaacttanntcacgggancncaacaattaccaaggccatcttgggaaggnaanntctattttgagcaggtg

SEQ ID NO: 4707 - DNA, 307 bp, Homo sapiens
gaactgcggcccccaactgttatgcatattgaataaagggacagaacagggatgaggtgccctccaatgcatactttgcaaatgtggtgaggaacatgggatgtggcatctgaattgcctgagtccaaatcgtggacccaatgcttcctggctgtgtaatttggacaagtgactgaaccttctgagcctcggtttctctcatctgtaaactggggacagtaatggtggttgtgagaagtacagtatgatgtgcctggcagagggagagagcagttgtgggttttggttgttgtttttaacgtaaaaa

SEQ ID NO: 4708 - DNA, 306 bp, Homo sapiens
  misc_feature 160: n = A,T,C or G
gtatcaacccctgataaataccatgcacattagattccaacttttccttccaagacaactcctgaaaacgtccacaaccatagaacttcgatgtcctggaagaatgcagaagaaccccaacaatcaagaaccctaggcagaaagggctatggtatgtggnagagaataagggcagagaatctgacattttcactctcagacacagagactattcaactgtaaaagtcaactggtacacagagccacgctgatgatattttgacttgttaacggagagaagaggaaatagattacaggtaaccgcag

SEQ ID NO: 4709 - DNA, 378 bp, Homo sapiens
atggagagatttccagtttaagatgccatactgaacatatacactgatctctttgcctttggaaactccattaagctgattgtaaaggaggaaaaggattctcacatgacaatgaagagactgaagaagtatcatcaatggataaagcagaatagaaatagcagccgcctggaccatacctagaaaggaatcattttgcctggcagaagcatgaaacagttccatatttgagatggcatttaccactgagggaaaaaaaaagtatcatgtgaaagaagcaagaattggactgaccacacacttgtcattgccaatcagatgctgcaaaacaatgggatctgtttttcagagttctgaaataaaatgctaatcaaacta

SEQ ID NO: 4710 - DNA, 183 bp, Homo sapiens
  misc_feature 138: n = A,T,C or G
cctcttgggcccttcttaccctgggctttaacttattcccaaaaatcttggtccctttgggaaagaacaatggctcaaacaagaatcccaattttcttttggcaagcaagtccaaagtggtcccaagggcttggcaangggaaacaccaaggtccattctttaacccctttaacaaaaaaaaa

SEQ ID NO: 4711 - DNA, 335 bp, Homo sapiens
gctgtcatagaagttacttggacaacaccacccacccctggggggtggggtggtgggaacttgcttggtgatggcaacaaacaaacaaacactttccccttcccacttctcttccggtattccagacaggaggaataatgtactgatctgctgacattaagaaggaccctattttcagattacttcttcaaaggagcagcatctacattggcaaggaccgccgtgaggatccaagtgcacagtgaggtggggggaggcagatacatggattcctttccacgtggcccacaagaaacacctgtctctccagactcggggaccaccagggaccttga

SEQ ID NO: 4712 - DNA, 306 bp, Homo sapiens
gtccaccttctccaatccctgcctgctgggagaggacgatctcttgagaaaggaaagacttctgtgctcccgagaacttcctatcaggtcctggctgcagggaaacaagctgggctttttataattaaggttggaagaagtcaccacaggcagcagaactccatcttgagatgaaataacatctacctggacctctggcagaatttcaaggcacacactgggctgactctggcgccatgatgttgccttatccttcagcactgggagatcaatactgggaagagattttgcttccaaagaatgggt

SEQ ID NO: 4713 - DNA, 374 bp, Homo sapiens
cccattcccttgctcctccaagagagtataaggatccatgcaccactcggagctggtcctgttgaaatgtttgctgaataaaagcaggaagggtggggaagaagagaagagaggagagaaagcacaggggaaggagtccagcactgacaacaaatctgtggagtttttccagactgaattcccccagcaaggaagagtggaaggaattcgagccctgtcacagaaacctggatccacactctaccttcaggcagaaagacaatgtcacagtgtctttatccactatagtgatgcaggagacaatggaagggaaattttggtgtcatgtcataagcagattacaaataataaaatacatctgaaaattgaaaaaa

SEQ ID NO: 4714 - DNA, 380 bp, Homo sapiens
ctggggccctaccccctcctccaggaagccttccaggcccatccagatggaaactggccactgggcctttggacctggcagaatactcattggctttcacctgctccctggcatgacactccaggacccaagcacacctcactatgcaaatgtggccatctgactcctcacccaaactccacaaaagtgccaaaaaggacctccatttaagaaccataaactacatttgaagaggtcttcccaatagacaagaagttttttgcaaagaggaccttatctgtacttctaatgcccagatcagcacctgccagatggccaataaatgtcagctgaatggatgaatggatgaataaatgaataaatgaacggaaaaaaaaaaa

SEQ ID NO: 4715 - DNA, 140 bp, Homo sapiens
agttttcaccccaacagctcacctggactcctcagtttctacccattggtacatctccacgtgcctccgcagtttcacagccggaagatggaccccatagtttggatcagacaaaagcttcaaacagaatcaaagaaacc

SEQ ID NO: 4716 - DNA, 256 bp, Homo sapiens
  misc_feature 16, 26, 41, 52, 64, 70, 72, 78, 83, 88, 92, 97, 98, 118,135, 141, 157, 159, 165, 166, 172, 187, 201, 206, 233: n = A,T,C or G
tgtgtaggaaaagaanatcttcttgntgcacgcattgttancctgaaagctnttcattttttgncatttngngtgggnacacncacanaacnttcanntaatcaagccaagccaagcntcaaccgcctagcctgnataggncaaaccaacaagtggngnaaaagnngccacncttttcatccctctncaccgactctggtngtggncctggaaatccccacacaaccgtttgnggatcccccaaatgggcgccatt

SEQ ID NO: 4717 - DNA, 313 bp, Homo sapiens
  misc_feature 24: n = A,T,C or G
agctaagagggccaacctttctcncaataaagtcaaggcagccactttcttctccatgggttgagttggcgtgaaaagaagactcctggcagaatgcaacttgaacctgaagagctttattcaagaacaattgaaactggaaattatgtttctaacatcacactgccttgtacttcatgcgctttattctacagagtactttaaggctacacctacacctcagaatgtttgaatttattcaagaaacaaaactaggttaaataataatataaaatgatgacaatgataataataaaaaattttttttcatttg

SEQ ID NO: 4718 - DNA, 101 bp, Homo sapiens
  misc_feature 32, 41, 43, 44, 47, 68, 78: n = A,T,C or G
cttggcaaggacatgctcaacaaaatccaatnttcattagnanncanccaagtgtccaaggctgcaanggaacaccantcatcttacgccttacaaaaaag

SEQ ID NO: 4719 - DNA, 316 bp, Homo sapiens
  misc_feature 152, 225, 273: n = A,T,C or G
cccaagcaaaacacactcagccttgaagtcagatgctctacagaagcctgcaaaaacagagtcaggagttgtgtggccttggccgagtcacctcacctcaccaagcctcagcctcctcacctattaaatggggacacaataggacccacttncttggagttgactgaggcctgggagctcctggaaggcacagacactgccatgcctggcacaggaaacgtactnagcaaatgttgcttcagtttgaaatccaactttttcagccttctgagnttcctttctctccccattaaatgcttcctaggctaaaaaaaaa

SEQ ID NO: 4720 - DNA, 369 bp, Homo sapiens
  misc_feature 21, 31, 32, 42, 81, 141, 152, 159, 166, 174, 230, 259, 277,298, 331: n = A,T,C or G
ttcaccttcattatcaggatnaagatcttgnngtggcacgancaggatcatgaccattaccgttctggcaagatgtacatngagaatgaccttgggttattgttacaccgatcaagtttaaccatcaggattgttccttgnggttttattgngtctctngggttgnaaaagagnttcatttgcttaagggcgtccccacgcctccaccttggggggaagttaaattgggnaatcattttattgaaaaaaattggccagngttttggcttttttgganaaaaattttgccttttgggcnttcccaaatttcttggttcattttccccaccgnattggccttggtcctggtggaaaggccggctttaccaa

SEQ ID NO: 4721 - DNA, 135 bp, Homo sapiens
  misc_feature 19, 26, 34, 49, 61, 65, 67: n = A,T,C or G
ttttttattttatggagtnatttttncagtcgtncttcgagccttgggncttcttgctttntttnanttcccgattgaagcagcctgaggccctcatctgatgcagaagctcaatctttgaactttccagtcacc

SEQ ID NO: 4722 - DNA, 117 bp, Homo sapiens
atgagactgaaaaagagaacacccatattccaggactggctctgctagaaatcagctcaccttaggaaggtcacttcatcttgctagccaagcttcctcatctgtaaaataaggaga

SEQ ID NO: 4723 - DNA, 330 bp, Homo sapiens
gtagttttgtttcactctaatgcttcccttaacgtgcttagccagagtactttggttataaaccggagtactttgtcttcaacaagaagggactgtctcagagacccaggaaaaggcctatgccaggcagtatggggcacagacttctgaggaattgttaagataatattgacaacataccatggactgagtcaagctatccagtaatctagtgaagaagctgatgagttcatgagactgccggttcaaactcagcatgattttatcgtctttcaagaaggagagaatgtaaataaattagctaactttggaatcttgcaaaaaaaaaaa

SEQ ID NO: 4724 - DNA, 381 bp, Homo sapiens
  misc_feature 34, 231, 271, 285, 291, 309, 326, 328, 331: n = A,T,C or G
gtggaacccggggggggccccaagggccctaatngcctccacccggccaagtggcctggaaacatctgggggccctgggattctggggcatcctcatggaaccattctggctcatcggtcatcccaagtggcttggatcttccaagggccttattggggataagaatcaaggggaagggccatcaacttggaaggggccaaggggaagctcttgccccatggacccttggnaattccccaccggttacttccaaactttccaatttcctcngccctagcccaccnccgggngggcctgtatttaacctnggaatacaaagacaccntnttnaatataaccttccaacaaccgcctttttttcttaacaaaaatgggggcaa

SEQ ID NO: 4725 - DNA, 524 bp, Homo sapiens
  misc_feature 332, 345, 351, 355, 357, 359, 370, 374, 376, 397, 427, 447,503: n = A,T,C or G
gtgcctctgatcatccaaggaagaaatgcagaagatccaagctaaagctttggcaatggaggaaagaaactgtattcaagggatactttagaagtaaaaatcaaaaggctgtgattaagaagggactgtcaaaatgcccctgagatttttaacctatgagacgaggaggatcgtggaacctttaactgaaacatgcaaatatgaggaagagaatgccagagtcagcaagggaccgctcagtaaggcacccatgaggcaacggggcgatgtccacaagatattaaatgacagatacacgggtttagtgatcaagagatctcgggctggggggnaactgccaatcantgtggnaggntngnaaatggggagngtgncnaaaaaaatggggaaagccaanaacaaaacctgtggaacaccccgaagggcncacagcattgaggaagggcncggagcaaaacctctccttttccattttatctccctggggggctggaaaccatttnaaaataaaaagccaaaaacca

SEQ ID NO: 4726 - DNA, 195 bp, Homo sapiens
atgaagaaactggggctgagagaagctagtttacttcacagcctctaaggatccagtagatgtatggatgaagagaggacacacacaaagccttaccagacacatggctgtaagatctgaaaaagttttggtttgaaaataaaaatggctaataatctatattcatataaacatatttaatgtgaacacaaaaaa

SEQ ID NO: 4727 - DNA, 233 bp, Homo sapiens
acaggtcggcttgcttcagaattctaccaggagaaatgtaacaacctggagagactcaagcaaaaatgcagggagcctcagacgttctaaaacacagaacaagaatgggaatgatgcttacctaaaaggattattgtaaagagtaaatacgtaaaaaacagagtccagtttgtgcagagacttatgcataaaaagcatttaataaaggtccgtttcaactatgaaaaaaaaaa

SEQ ID NO: 4728 - DNA, 224 bp, Homo sapiens
cacattcctcattgaacactcacctctcatcggggatcaacatgttcagatgtgccatacccaggatgattcatcgtgatcaaagaaaacaatgtgattgtggtaaatccctttatcagtgtagcttattattactaccaagaacttgaattgattcaagctacagacttgaataaacctcatgatttagtaaaataaacctcactgattttcaaaaaaaaaaa

SEQ ID NO: 4729 - DNA, 499 bp, Homo sapiens
  misc_feature 105, 140, 176, 179, 193, 313, 351, 439, 466, 471: n = A,T,C or G
gttaggaagctggaacaggacacggtttgggcagcaaagctgttgtgtgctgataaccttgaaatctggaccatattcagtgttgagctagagttggcccatacntattcctgagtgctgattggtaagaattaaaggcnatttgaaaagggatttagattgaaaaccagaaatcnatnaagaaaaatcaacnaaacttgaagctgccttttggaaaacatccaataaaattgataaagttttagccagacacaggcacaatccttctcactgaaaccgtgttgcagctgccagtttttacagattctaatgncctttccaaaaaaatgagtagagtgtccaagaaaaggntttcatttctgggatgatgcttctgaacctgctcatttagctaagttttcaaataccatttgttgaaaagactttcctttcccattgnctatccttggcatccttcttaaaacanaaagngctggagattcattccaagtcaccgtgg

SEQ ID NO: 4730 - DNA, 483 bp, Homo sapiens
  misc_feature 38, 43, 341: n = A,T,C or G
atcctttggggaagatttatgtggcgaggatcactctncttanagtgagactgcagcaggaaaaaggaagagactttgaggtcaaagggaaggaggtgaacagagatgggaaaaggcgttgcaggtcaacaagtcccaggctgttggacagtgatccagaaagagagtgagagctcagaggtgagccgctgtgtgggagctcctggagatacaagatacaaggagtggggattcccattcccccaggatgccagccagagcacctggacccagtgagacctctgggacagtggacatctcagtagtgaccagaaggtctctggccctgcaaaagcatttangaacttgtccacaaactggaacttgtccacaaattgtccaagactgagacaattcctcctgacatgaaagggatgggaactcacaatttgatttaaagttgattcacaaaaataacaagatgtcatattcctcgctttctta

SEQ ID NO: 4731 - DNA, 158 bp, Homo sapiens
  misc_feature 19, 35, 36, 43, 100, 112, 135, 136: n = A,T,C or G
aatgtgagccaccaacaancagcatcctgaaggannggctgcntcctctgcgcactgtatgcatgaccaggcctgagatgaccacgaccataaaccagcnagactgatgtgnggaaaaaagtaatgggggtgacnngttccctacacttggaactaaa

SEQ ID NO: 4732 - DNA, 141 bp, Homo sapiens
  misc_feature 21, 22, 28, 31, 33, 63, 87, 89, 104, 109, 120: n = A,T,C or G
acttactgctttcaaacaacnntgtgtncancngtctcttgcattgggtaccatgaataaganccactattttcttccattgcctancngggtatttttatganatganccgtgtgggcnaccatacttggattttccttt

SEQ ID NO: 4733 - DNA, 219 bp, Homo sapiens
  misc_feature 116, 150, 155, 161, 181, 194, 196: n = A,T,C or G
tgcacgtggcacagagtcagggctgacattgagcagggcacccttggtctcccccaagacccatcaaaagtgtgcctggcaccgcctttcaataaaaaagcccaaggtctgaacanggtggggcgtcttcccttccccagcaggatgaangtcanagctgnaattgcttaattcaacaccnaaaacagtcctgnangaaaatggggtgagcttggcttg

SEQ ID NO: 4734 - DNA, 301 bp, Homo sapiens
gtgtcctagaagaagagaccctacactgggcttgtgaccagcggaaactgaatcaatgctggagacacattctaacagtcgaatgggcagctcacaggagcaatgaatttgaaaggaaaagagaaatggaggaagaacatgaagaacaaaattatatgtatagttgaaaaactcacttggcaacatggataagaattgagatggtttaatttcccttaatgactaaactttgatagaaatctcatgatgatagtgaaagtagaagtagtaataaaaatcccctccctctacaaaaaaaaaa

SEQ ID NO: 4735 - DNA, 519 bp, Homo sapiens
gaaatatgtggcctcttggttaccccaccagggataatcacacccttcctatatgagtgtttgttttctgacttgactccatgcagcagaagaccttctgcaaggaacagtctaaccctaaagcatggataagcagtgtgttctaagacatgttgcccactgaagcctttgaagtttaagcatcaagaaatgtgattaaagagacacacaaaaaagaagttcttgaagggatgatgagcaaagattaacagaaaagtacatttagatccataaaagctgtcatttaatacactaagagtccaaatcaccctgagtgcatcttctccttgagataccctgcttcctttggagaaaatggaattaccgtgtttgtggtgagagaaaatgtttacctagagaatcaacctgtaattaacagaactttttgacttgagacatacaggtgtgcacatggaatgcatcttgacacatgccagagaaactggctttacatctgggaaagctgagggcaggatatta

SEQ ID NO: 4736 - DNA, 149 bp, Homo sapiens
  misc_feature 34, 43, 51, 52, 53, 54, 57, 63, 64, 95: n = A,T,C or G
aatcatatgcagagtttttctttgactgcagggntccccaaanaccgaggnnnnganaacgtnngggattcctttgttcttggagacaactccanagaacaattctcaataagaaaagttataaaaagcttcaatcagcaaaaaaaaaa

SEQ ID NO: 4737 - DNA, 190 bp, Homo sapiens
  misc_feature 48, 64, 74, 75, 94: n = A,T,C or G
gacttggaagctaaggcccagagagggggagaaacttgatcaaagtcnatcaagacaatgcagnattcgagaanngggcccggaaccttatatncccaccttggtctcccaaagtgcttagaaaaatacctctagttgaagccaaaagctagaatccttttacggaaactacagggattaaaatggggga

SEQ ID NO: 4738 - DNA, 137 bp, Homo sapiens
  misc_feature 42, 44, 47, 49, 58, 96, 103, 111, 112: n = A,T,C or G
agttgcgcagcaaacaccgacttgagcgtggctgaggattananacnanaactggggntatgcaccagttgccaccaccagggcagtgtcccaccnaacacangggtttcnnttgaattttcccacttgtaccccaa

SEQ ID NO: 4739 - DNA, 323 bp, Homo sapiens
  misc_feature 17, 65, 72, 73, 74, 93, 95, 101, 154, 163, 172, 174, 189,190, 193, 199, 200, 214, 233, 242, 243, 257, 265, 270, 281,283, 285, 289, 299: n = A,T,C or G
gagcagctggtcacacngtgatgactgctgctatctctggatgtagtcacgccaggtgccacatngtgaggnnnctcatcagcacctatggangncgcttnttataacattgaaacaaaggtcttccgccaacaaccatgagtgtgccattttnaaaaggatncttcatatncnaggactttgtccttnngtnttctcnncaggtcatggccangaaatcccacatgcagccncacaagganncctttttcagctanaaactaanatctncccttaggacntngngtgnggggcgctgntgccccccacaagaggattattga

SEQ ID NO: 4740 - DNA, 120 bp, Homo sapiens
  misc_feature 16, 17, 41, 53, 57, 76, 78, 85, 87, 90: n = A,T,C or G
catgaccagctggggnnggaaaaaaccccgaaacattgggnactgtgtattancttncatgtgaaccagtttagtncngccagtngntgnagaatgccctcaatcattgccttattggga

SEQ ID NO: 4741 - DNA, 518 bp, Homo sapiens
  misc_feature 477, 492: n = A,T,C or G
aggggaatgccgaggatcaagagagattggctgacatgcctgttgtgcgttttgtaagcggcacagggggattcttctgccccacttctactgactccgtgatccagtgctgccttgaatcttcggaaactctaaagtaggggctccccgcttctgagaaagactccgtagctctcttttggacacagctgcagtgccatccttctgggagagccagcctggagcagaacagctggggctcatctatctgctgcccaacaaaccttggaaggagtatgataggaaggttccattcagactgctcttctctggtggctctggggaaaagggcatgatgaggggagatgcccttttttcctcctgttaatctgccctcatccctgactccctttcctgctgtcttctatccaaccacacagtacccagcttaaaaccaaggtgggatggaaaagggttcaagttgatcatggaactcanaatgcatttttctgnaaaagtagctggaatgcgatgcctgg

SEQ ID NO: 4742 - DNA, 202 bp, Homo sapiens
atgacatgatgaccgaagttctaccagctgttatggatcatgcgatgtcccagaggaaggaagccacacccttggatggtaaaatagaaggaagagaatttggctgtctaataccgtggtgctgcagtactaacatgagtttatgtatttccagctttcttttatatgaaagtaaaataattttcatcttataaaaaaaaaa

SEQ ID NO: 4743 - DNA, 188 bp, Homo sapiens
  misc_feature 16, 39, 51, 63, 85, 98, 157: n = A,T,C or G
tggatggacagggtcncagactcctctggatactaaganatctcatgagancatcctcacttngaggccacgtggcccaaatttngtgagaggtgatnacgaccaaaccttcacctagtgtaagagaggctccctaacaggccttcctccactgatntacgcatgaagtcctctagtggcccaggggg

SEQ ID NO: 4744 - DNA, 142 bp, Homo sapiens
  misc_feature 25, 29, 34, 70, 72, 85, 113, 116, 124: n = A,T,C or G
ctaaaatctttataaaaacccttgngggnacagngaggctgattcactgaagggaaagcgtttcaaccgngncatttgctctctngcattccagattagcaaaatgggggtanagngcgttatncgaattttatcaccataa

SEQ ID NO: 4745 - DNA, 251 bp, Homo sapiens
tttcaagctgacttcagatgcactgtgctgcgtcttctgcatttgggaccttgcctgtatccagctctcggatggtggtgaccagggatgttttgagttctccagcctcattcctcgtctgcctccttaggaggcagttctcccaggggcagaaggtgaatagatggcagtaagaattccccctcactgtaacccctcctcttcttcccctgataataacagcagtcgtaaatgccgtttaaaaaaaaaaa

SEQ ID NO: 4746 - DNA, 288 bp, Homo sapiens
gaataaactctgaccttcatggaaattctaccacctcagtaaaggaaaactttagctccagctaagcctagaatcctgcaaggaagggaagctgaaatgagatttttattggaataaggaacatgcactcttcgagttctgagatcccaggtgctttgccgtgagaaagatgaggactgggcttgtgacctctgacaaggaaaatgcctggcaggaaatctactttctgtcaggctttccaggagcagcatgggcctcagaaggcctgagggagtggaaatgggctgg

SEQ ID NO: 4747 - DNA, 425 bp, Homo sapiens
  misc_feature 22, 32, 33, 87, 98, 99, 107, 123, 137, 151, 189, 192, 203,268, 269, 274, 278, 285, 286, 290, 299, 300, 301, 311, 314,324, 328, 338, 345, 354, 357, 361, 363, 365, 368, 375, 395: n = A,T,C or G
ccaaagcatgcacatgcatgtnacatcatacnnttggattctactctacgcactcttcgcaaacatctcccatgtatcacatccatntgtctacctgnncgtacaanccgtatctcgtcaccntgtacacattgtancaagaacttggatngcacactcattcactccaaaccgtgcatatatatgcgngantttatgtaacntaagacaaccacgcgcgtgtgcacccaattactctaagcacaaagcgcatgtgcactttctttannccttngccngatatannttcnataggaaannncaagcccttntcncttactatancgcntgcactcgancaaattngtcatcgcnaantttnancnagnggacacntagaaagacacgatcactancaatcgctcggagacatggagaaagccaaa

SEQ ID NO: 4748 - DNA, 250 bp, Homo sapiens
atattctcttacaaggaaactcttcattttgaaaatattttccaattgacacttcttttgcaagcatgagttacacctcaaaagaaatatgaattcatcaatgaaagaaactctacgttaccaaactttttttccatttcttaactagagtctggcataaattatgccctcaataaatatttgctaaatatttatttgtataaaatcttaaaataagttaaataaaagcatattcagaggaaaaaaaaaa

SEQ ID NO: 4749 - DNA, 329 bp, Homo sapiens
cgccatgctcttctaatcggctgaactaacaggatcaagagaatgaacttgcaggaccaggagaatgaagtgacagtgaaaagaacagcgaatcacaaacacatgggccacagcactgcgcagtgacattatgaatagagggcctaatggcttatctattgatctatctgctcttaattctgcttggctgttactttcttcaagtaacatttccaaattacattcaaattcagtctccattaaggaaacaggactgtggaacagataatccaattgtcatttcttttcgtctttggaatgggttctaatggtaatttgaagaaaagaat

SEQ ID NO: 4750 - DNA, 400 bp, Homo sapiens
  misc_feature 378: n = A,T,C or G
gtactcatcatcctctgtgccccactccagctccaccttccgcctgatggcctctgggagagagacatggatggcctcaatttatagagaagggaaactgaggctcaggacaagactgtggacaccaggcaagactggaaactggtctgtcagattcagcactgctcagcctcattccacccaaaactaaggtgaaaagagcaccaagagctgcaaaaagggggactcaaaggagagaaggggcactgaagctgagacactgccctgggggtgtggagatctgtgtcggcaatgtcagatttcactgcctcctctgggtcttgcctacacacatggacaccctgccctgcccttaagcccaggctcaagcacattgtngggtcttgttcacaggcagcac

SEQ ID NO: 4751 - DNA, 331 bp, Homo sapiens
atcccaaaggaagcaagtacttaaatattataaacaagtgataaaaataaaggaaaatgcagaaactctggccaagtcctcactcctcaggaagcaactgagcatcagcctcagcgatacgttgtgtaaattagccttctgagagaaattgagtggatccggagccggagatattggcctcaaggtatgagccagcaacattctgagggttctaggaatggcttctcattatgggagcacttggttaaattaaactaccacagtgctcagagttctaatacagtgagctctgcaatgtgcatgaatgcagataaattgcacagggctagaa

SEQ ID NO: 4752 - DNA, 333 bp, Homo sapiens
ttcttccagtgtgaagacttcagctacatctcagcaagaaggaaaaagtgtttgttcatctacaacccacagtgtgctgcacttgcttctgtttggataactggactcctcaagacagcagcactcaccggggcaggagctacaagccctctatgttgactgatcctcctccaggacaaggtgaatttggaattctggaatttggaaaattggcccggtgtagatgctcaggaacccagtaaggacaacagagaccttctaaatggtgataaagttttcttaacttttcctttcaggattttatttgcatctcagaatattgtattagacatg

SEQ ID NO: 4753 - DNA, 334 bp, Homo sapiens
ggacacaagaggttcatgtgatgtaataagaaagaaataaaggaagctttatctgccgctctttcaacctcatccactcaacacttaccccgtgacagaccccaatactcttaatgaattcccaaggttacgaaagaacttggaagatcttacattcctacatggtgattacagaggctcacattttgccaagtcatatgcaggtggctgaaaaatgtgatctaacgtccttgaacacatttattacaatccatcatctacatggcaacagtcagggccatgctcataaaccagaactggtgctagatctggacatgccttttgccttctacca

SEQ ID NO: 4754 - DNA, 220 bp, Homo sapiens
ggctgacactaactcattgccacctgctggagaagagaagacgtgcagccagacacctgccgccttgtcaggcctgtgtcgccgcctccgcagcccgaaatcatcctgccctccaaggcaccgccctgatgctccaggtgaaggctgaagaatggggctctcaaacacatcaaagcctgctaagtctccaattctccctgggaaacaagaaaccccttgg

SEQ ID NO: 4755 - DNA, 263 bp, Homo sapiens
  misc_feature 18, 46, 47, 52, 54, 59, 60, 89, 94, 103, 155, 163, 179, 232,233, 247: n = A,T,C or G
ccttcctgaccatatccnctgtctctttgcctcttgggaaactccnntttantntgtgnnaaggggggaaaagggttctcacatgacantgaanagactggtngaaaatatcatcaatgggggaatagccgcaataataaaaaatcagcccgccngggccctnccctttaaaggggatnattttgcctgggggcaagcatcgataacaacttcccctattttggggaagggnntttttccccctggngggggaaaaaaaaaaa

SEQ ID NO: 4756 - DNA, 458 bp, Homo sapiens
  misc_feature 341, 373, 395, 426, 428: n = A,T,C or G
ctattgcaggtctgacgaagcagggatgagactcacagaagacagctgccgctttgccctgtgaccgaggtcctccgcaatcattgctgctctgcttacagaattattatcatggtgaaaggaaagagtgctttccaaagtgtgaagagttatgtagtgattgtttaccccttccatgtgggctgggagtagtcagggagggtcaatttgctgtccacattcagcataaaaatagctccaatgtgctaaaaatatttgtcatccacacagagaaatctgcaagtcctcaccacggagccttgaaaaggaggtcacagaaatatctggagcaaaaggacttnctctcactttgctcacctaatagcaatcttanaataagggtttcttactgctangcccaaaaactggggtttttgcatttttgcncnaaaattttgtctggggtctgcttacctctg

SEQ ID NO: 4757 - DNA, 141 bp, Homo sapiens
  misc_feature 55, 66, 70, 95, 104, 116: n = A,T,C or G
cctttttgagcaagttcaagcctggttaagtccaagcttgaattgggcctcgctncccatttaaangggncgccgccatttaaaatgggccgctntggggccanattcttttgggnttttaccctgggggaagaaaatact

SEQ ID NO: 4758 - DNA, 128 bp, Homo sapiens
  misc_feature 23, 24, 56, 62, 63, 76, 79, 93, 94, 101, 105: n = A,T,C or G
gagcatggttcagcctggttaannccaagctgaattggccctcgctgggccatttnttttgnnttttaccctgggnaanaaaatacttataanncacctgnttgntatttacccccattttttaacaa

SEQ ID NO: 4759 - DNA, 407 bp, Homo sapiens
  misc_feature 76, 90, 114, 147, 157, 167, 172, 181, 186, 192, 236, 247,259, 266, 274, 294, 297, 304, 323, 325, 326, 339, 344, 375: n = A,T,C or G
ggaccgctcttgggggggggaggcctaacccttggcatttaaagttcaagaaaacttggaaggcttattttgcccnggtccttggatggnacaaccaaggagtatgtagcactncaccaacaaaagtaccagcctggcgttggctcnttagaccccntgtttaaccnaaaangtgcccttncaccnagatanaattttggcttggcttctttgctttaaccaagaaccttcatttnttcaattgggntggaacaagggngaaacangaattttncctttttgcccacccggttngtnggaagtngtaagaacctcccaaaaangnnggggggccccccnggaanggcccccctcccaaaaaggcccccgttttgnccttaaaaaaaggggaatggggggtgggggaa

SEQ ID NO: 4760 - DNA, 558 bp, Homo sapiens
  misc_feature 38, 47, 59, 68, 69, 84, 88, 95, 99, 102, 104, 106, 117, 133,143, 152, 216, 234, 236, 254, 273, 292, 294, 300, 302, 305,337, 355, 366, 379, 391, 405, 411, 425, 444, 445, 455, 457,482, 501, 506, 513, 537: n = A,T,C or G
cctcttgggggggaacttacctggcatttaaagttcantaactgganggcttccccgtnattcaggtnntagggatggggcagnccantgccctngcgngangngncattcgtaacntttcacccttggattngcttggcctntcaaactancttctcaaaaattaccgtgggggcccaaggaattgggggggccacgcgttcacgaattggactngattggggaccagccttngngaattttcctttaccaantgggaaccaattcccctangcaacccccctttcaaaangngggtancnaanaggggcggccaaaggctcggcaacgtaaatantggtaacctaaccaaagnggttggtgcgnccaaagcctattnccaatttggacntttggtcctttctnggggcntttaaccccaaagnccattatcggtttcggccnntctggggccngnatgggggttttaaatccaagggggnccccttggttggccccttnggccntttcgtnttgcggttcgttgaatttctattnaattaaattttcggcaaattt

SEQ ID NO: 4761 - DNA, 367 bp, Homo sapiens
  misc_feature 29, 126, 177, 186, 190, 195, 272, 273, 280, 299, 304, 327,337: n = A,T,C or G
aaaaccttggaagaggttcttggggaagnggctttggggggccattctttggaaggaattccgggggggaccccaaggccattggggtttaaggggttttccttggggttggccaagcccccaagnaagccaagccaaggggaagccttggtggccccccttggggccccccccttnggtcccttngaanggaancctttccccacttggggtccaaaccccccgcccttaacttcccaaagcttggggaaccctttggaattggccttttnnacaaccnaaaggggtgggttggcccnccaanaaaggggaacaaccaaggggccnccttttcaantggggaagccaacccaattaaccttttttt

SEQ ID NO: 4762 - DNA, 300 bp, Homo sapiens
  misc_feature 108, 221, 277: n = A,T,C or G
gttgactccatggatgcagagcccacagacacagagggccagctataccacagcacaaatagtctaaagcaacaagaaaaattagaagacaatgaagcaatgcctcanaattctgagtaaaaatcattttaacctggaattgtataacatatgtgttatattgtttcagagatgactacaacatttcttcatatctgggtacgtgtacctctttgcaatgngatttcacttctcccatcagggagtggaatctatttccccacttcttgaatctaanctgatcttaacttatttcaaccc

SEQ ID NO: 4763 - DNA, 445 bp, Homo sapiens
  misc_feature 56, 63, 66, 69, 71, 74, 80, 88, 94, 101, 102, 113, 117, 135,146, 166, 167, 175, 180, 183, 208, 246, 248, 256, 263, 266,277, 285, 308, 327, 340, 361, 384, 392, 401, 415: n = A,T,C or G
tgggggggtaggcttaccttggccattttaaaggttcaaggaaacttggaaggaanctaaggnagngtncncanggaatntttggggncttcanttaaggnncttaattaagntttngccccaacccccttgggntttttattacnaaacccttggggaaactaanngggaaagnccagnatntacccttagcccttggttcccccgnaaggggccattggggaataggccttggtaatatttgantnttttactngcactcnctncttaaggggantcgaaatnggaattaaccaaccaatcttacncaaggaaggggttggggcnttggctcaagggngaggaacccaaggttgtttgnagacaaaggccccttctttttgnttcccccncaagtaacnttaaaagggcccanaaagaaaaccccaatttcttggggcccccc

SEQ ID NO: 4764 - DNA, 106 bp, Homo sapiens
  misc_feature 55, 64, 67, 68, 84, 86: n = A,T,C or G
gcggccaggggggaaaaacgccatgcttaaaatcccacggaagtgagcctgaggnagacccagnccnnctcgtcttacccaatngngcaaaacaacccccaaaaga

SEQ ID NO: 4765 - DNA, 447 bp, Homo sapiens
  misc_feature 18, 168, 215, 233, 257, 269, 300, 330, 383, 384, 397, 413,424, 430: n = A,T,C or G
ggccattttaaaaggttncaaggaaaaccttggaagagggaccggttggggttggggggttccccttccttggggttggccggaaaaattttccccgggggattttttccccttttggggggttccttttcccggggttaagggggaaggccttggttaaaattccanaattttggttggccttgggaccacaaccaccaagggggaaggccccncaaaaaaaaccccttggngaatttaatttcaatttcttcccncctgggaaaagngggggggaatttcaaaaggggggacccgggngtttggaaaaccaaaaaacctttttccccnccctttcctttggttggttggggggttgaaccaattgggggtggaattggggnncccccaaggtccncaaggaaaaaaggggngccaaaccccncagaanacctttaaaaaaaaaaa

SEQ ID NO: 4766 - DNA, 623 bp, Homo sapiens
  misc_feature 16, 21, 30, 54, 80, 110, 120, 136, 138, 144, 171, 184, 213,306, 395, 414, 428, 484, 502, 519, 526, 545, 546, 573, 574,579, 595, 598: n = A,T,C or G
ccccagggggtcccanctttnttggggggngggaagggggaaaaaattgggggnacccattgggaatttttttccccttnacccaaattttaattgggaaattttaaccntaatttattnccccggaggggggaangncaaaanccaaaacccccacctttttttctttcnttggccaaaggtngggggaaaaaaggggggggaattcccggnccccaagggttggggggaaaaaggtttttccaatttaaaaattgggtgggcccccgggggaaattggaaacctttggaaaaatttaaccccgnaacccttgggttgggaaaatttttttgggcccaaaaaaattgggtttttttaaaggaaaattttttttggccccccaccccaatttaanccccccaaaaaaatttccntttggggggggttngggaaaaaaaaggggggaaaaaaaaaggggggggggggcccccggggggggggggnaccccaaggggggaaaangggggggttggggtttnccccccncccaattttaatttggggnnttttaaaaacccaaattttccaaaaannttttngggggggaatttcctnttncccccttaatttttaaaaaaaaaaa

SEQ ID NO: 4767 - DNA, 145 bp, Homo sapiens
  misc_feature 19, 29, 45, 46, 72, 86, 88, 113, 127, 129: n = A,T,C or G
acccttataacaggatatntgaacacacnatatgagaccagggannttgacacacagcaggaaagaccgtgngagaacatggtgananaggccagccatctgcaagccacaanagtagaaggccttnanggagaaaaccacattg

SEQ ID NO: 4768 - DNA, 164 bp, Homo sapiens
  misc_feature 16, 30, 68, 118, 144: n = A,T,C or G
ttttaaaagttccagnaaaactgggagggnccataaccccccaaaaaccaaaaattttttccccaagncccttttccttggccaagtgggaaggggtgggggaagccccaaaaatggnacttaaaaaatttcttggtggttggnttgggggaagaaaaataaaa

SEQ ID NO: 4769 - DNA, 290 bp, Homo sapiens
  misc_feature 40, 45, 78, 87, 91, 94, 95, 101, 107, 121, 141, 152, 159,179, 189, 191, 196, 198, 200, 207, 209, 212, 217, 223, 243,247, 250, 270: n = A,T,C or G
aaaccttggaggccttttcatttccgccaagttaaggggnaaatngggccaaggcccccccattcttatttggaaaanggggaaaangganccnngggtcnttggcntggggggggggggncccccgggggaatgggaagntaccttggggnaaaggtnggtttttaagaatgggaagnaaacctttananagggnangncctttcntncanttggnccaaangaaaaggtttaaagaaaaangccntcnttttccgaaaatccaaaagntttggtccccccaaccaagg

SEQ ID NO: 4770 - DNA, 358 bp, Homo sapiens
  misc_feature 193, 217, 221, 223, 227, 243, 245, 262, 269, 277, 283, 292,316, 320, 322, 336, 340: n = A,T,C or G
cttgcttggcttcacttctttttgggggttcccggcccattttggcctttttattgggggccttggtttaaaccggccttccaacccggccggaaaagggttccttggcaaggccttttccccttcccttggaaaaggccccaaggccggaaaaaacccaacggaaaccccggaccccggggggagggggaangccggaaaattaaaccttcccaangaancngccncccaacccttttaatnanggcttggggaaaacaanggtccanccctttcngaaaanaggggcccnggcaaacctttttacatttccttnaaananccccggccgggagngaanttaacccgaaaacccccc

SEQ ID NO: 4771 - DNA, 504 bp, Homo sapiens
  misc_feature 18, 24, 42, 68, 82, 86, 94, 153, 160, 163, 177, 180, 182,195, 249: n = A,T,C or G
aaccattattaccacctngggatncttcttttttggcccctnttttgggggaaaaaccttccccaatnttaaaaggcctcgnaatnttggttanacaagggggaagggggaaaaaaaagggggaattttccttccaacccaattgggaaccanaattggnaanaagcaagcaacctnggnanaagcaaaagggtnaattccaattccacaattggggggaattacaacaaggccacgcaaaattaaggnaaaaaattaaaggcccaaggccccggccccttgggggaaccccaatttaacccctttaagggaaaaaaaggggggaaaattccaatttttttttggccccctttgggggcccaagggaaaaagggcccaatttgggaaaaaaaacccaagggtttttccccccaatttaatttttttttgggaaggggaaattggggggcccaatttttttttaaccccccaaccctttgggaaggggggggggaaaaaaaaaaa

SEQ ID NO: 4772 - DNA, 177 bp, Homo sapiens
atgaaaacagcaactgtacctgacttacctaaagacctggatgagttaagaagcagacccaggacttaaagacagatcttttgaattcagagctctttctccaggaaaagagaacctacaatgtttcagaaataaatcacattgcagtagatcctttggagcttcaaaaaaataaaa

SEQ ID NO: 4773 - DNA, 110 bp, Homo sapiens
  misc_feature 24, 29, 32, 41, 42, 44, 48, 72, 92: n = A,T,C or G
cagccggcctttgtttttttgcanacggnatntctcatgcnngntgcnctgtctccttgcaacctatttttntactttctccaataaatcancctttttctgcctaaaat

SEQ ID NO: 4774 - DNA, 102 bp, Homo sapiens
  misc_feature 16, 20, 30, 61, 62, 65, 70, 71, 80, 85: n = A,T,C or G
ttaaacaagcgacgtncttnccttccaatntatggattgaggacaatgccaacaagccagnngcnctgtnnacactactnattgngctaccatttttctgga

SEQ ID NO: 4775 - DNA, 226 bp, Homo sapiens
  misc_feature 26, 41, 122, 140: n = A,T,C or G
gaaggcctttaaggatgataacgcanaatggatcagccttnagtctaccaagtcccatttcacacgaagtcttgcaccaatccgaaaagagaaggttatggacacagaagaggtttaggaanggctggaaaaaaaatctncaatgaatgacacaccacatcacggtttattctcctacacaatttgagaaacaatactagaaaaatatcataccataaaaaaaaaa

SEQ ID NO: 4776 - DNA, 166 bp, Homo sapiens
tactgggaagactttgaatacatcctggatccagaagccaagaagccagataactggaaggaggctatggatggggagtgggaaaggcctctgatgccaaatccgaagtataaggacctaagagaagcaatggagagaactttatgaagaaattgaaaaaaaaaaa

SEQ ID NO: 4777 - DNA, 134 bp, Homo sapiens
  misc_feature 24, 36, 54, 93: n = A,T,C or G
gaaagacatgttgattgatacctnatgagagactantgagccagactacccagncaccttaacaacccaagatacctgaccatcaacccacangcgtgaaataataaatgttcagttgttttaacaaaaaaaaa

SEQ ID NO: 4778 - DNA, 218 bp, Homo sapiens
atagtctaccctgtatatactttatctcatgagtgccaaaaagttgaatgagtatcaccatgaaaaaaattgaatgtgcattgccacacttatatttggatctagacaagagcctcagtaaatgaataagaagacaacataaagtataagaagcaggaactcaccgatcactcacattattctctaattaaaggttcatgcttaccacaaaaaaaaaa

SEQ ID NO: 4779 - DNA, 301 bp, Homo sapiens
attataatccatatccagtcaaatatgttggaaaacctgataaagactctaaaaaatgctgcagaaggaaatttatcaaaatttgtgaaaagacatgtgttctcggaggaagtgctggccaaggtgagggaaaaagtgaaggatgtgcctgcccttgtggccaaatttgatgagatctatgggacactgcacatcactggccaggtcaccactgattctttggatgctgtgctctgccacacccccagggacaggaaatctcacacgttgctattaaacaagaggatggtcagccggtgca

SEQ ID NO: 4780 - DNA, 304 bp, Homo sapiens
aatacccagagtggcttgtgtttcctgggctgaaccctgcctggagagctgtccctgcaagctgaactaacagaagatgaagaatgaggtctccctgaaatgcccaccataagactgccagatatgggactgctggatgacactccggctaccccactgagttttatgaaaacataacagaataaagacacttacttgtcaactcagttacaagctattgaggcactccagagtgacagcatgtgatccccctgacacaagaaacaggcccagataacacaccgttcagaccaacagcagttct

SEQ ID NO: 4781 - DNA, 315 bp, Homo sapiens
aaacctgggaggcaggcatgtcctaaactgtgaattgcagaacacaagccagaaataaaagcatccaaaagcttgaaggcagaatccaagggtcatcaccctgcctgcaaggagcctaactggagagaaagaaagtcccttaattcattcaacacatatgaatcacgcaggcctgctttttggtgaaccccaggtttggttctggagatacactggggcaccagaccagcccctcccctctcaaaggtttggcaaaatatgctgtatgacacagcagaataaacgttgcactgttataaaattcaaaaaaaaaaa

SEQ ID NO: 4782 - DNA, 241 bp, Homo sapiens
  misc_feature 214: n = A,T,C or G
ttcaatcccacgtatccattgagaacttggaatttacacattgtgttgacaagagttgaagtgagtgggacaccctgcaccaggactcagctggaggacatggccacccaaatgggtagttgcggatctcatattcagtcttcagcttgtgctcctattgctgagactgctcacctttcctcatccatgccccatgggatgaggaaccctaggnggtgaataaaggctgcagtctaactgt

SEQ ID NO: 4783 - DNA, 329 bp, Homo sapiens
  misc_feature 26, 27, 31, 42, 77, 83, 84, 96, 102, 118, 154, 176, 194,203, 207, 210, 219, 222, 225, 228, 260, 266, 274, 300, 304: n = A,T,C or G
cctggcatttaaagttcaggaactgnngggncaccgccttantggccccagctttccgcttttgcccttttccttgnaaaagnngggaaagccggnccctgnaggaacccctttattnaaagaaagcacgatggtttgggcacccatggctttnttttgtaccgggggcttggganggaaactttaaagaaaanggggccctncatntanaaaatcttnggnttnctntcgaatctttgggaaccttttccccagccctntccaanaaacttgnggggaggccccaataaaaaaaatttnttgngttccatttttcccaaaaaaaaaaa

SEQ ID NO: 4784 - DNA, 238 bp, Homo sapiens
  misc_feature 23, 31, 41, 48, 66, 86, 87, 109, 115, 124, 129, 130, 131,139, 178, 196, 212: n = A,T,C or G
ctgtgactcagggaggactcttngcctgccncttaatcccnggaaganaacgccgctttggaaccntcaactggaagtcctggaanntggacttcttgaaaaacttttngccagnaaaaacagnaacannntttcattnccttttaaaacaaggaaagtgggcccccttgggaaaccncaccggggaaggggccgntttttgggcccccccngcccttggaactaacggaaaaacccc

SEQ ID NO: 4785 - DNA, 212 bp, Homo sapiens
  misc_feature 91, 135, 137, 147, 161, 166, 169, 183: n = A,T,C or G
gctctccgctgaaacactgtgggatggcactcccggactgaaggctgaacagcatacggcaacagatttctcttagaggaagagcctggangaatgctccatcctggtctttgtaatattcaagcatataacaantnaagacgtatncctggtaaattgtnaaatngancacctatgtttttnacccccaatcttcacaagaaaaactgtaa

SEQ ID NO: 4786 - DNA, 298 bp, Homo sapiens
  misc_feature 205, 279, 281: n = A,T,C or G
catgggatgctgtcacttgcctaaggctcaagatttgactctgaagagtgagtgattgagaatgaaattgagaggatgcccaggagaactgcaaggtgtctaacatgatcaccatcactctattggtcaatatctaaactcaggcaactgaatcctgctttggcaagatgcccaaccagacagtctgaagggatatacacctacnaaacaatgaaatcctaagataaaatggactttcagaatgtgctcacttagacttcaagtaatgacagaaccctncntaaaccccaaagcaagc

SEQ ID NO: 4787 - DNA, 325 bp, Homo sapiens
  misc_feature 20, 28, 32, 68, 69, 74, 79, 186, 275: n = A,T,C or G
tttaaaagttccaaaaactnggaaggcnttcntgggggtccgaagaaaaaagggcccaaagtttggcnnccacnttacntgggagaagaacttggcccattggccaccccccttggggaggggcctcaaaaaaacaattttcggaacaatggcctccaagttcattgggcccaccggggcaaggtnggaccttggcttggattggcccttaaacccccccaccattggttggttttcttcccccccttttccccttggattaaaattccaaaagnccccccttggattttttttcaagccttggggggccaccaaaaaaaataaa

SEQ ID NO: 4788 - DNA, 233 bp, Homo sapiens
  misc_feature 30, 33, 205, 217: n = A,T,C or G
aaatgggaacaacctgggaggaggactcangcncaaaaaggcccggggaggccctccagacgttcttaaaaacaccaggaaccaaggaatggggaaatggatggcttaccttaaaaagggattattgtaaagagtaaatacgttaaaaaacagagtccagtttgtgcagagacttatgcataaaaagcattttaataaaaggggncccgttcaaccntttggaaaaaaaaaaa

SEQ ID NO: 4789 - DNA, 235 bp, Homo sapiens
  misc_feature 18, 35, 85, 157, 178, 186, 194, 199, 202, 206: n = A,T,C or G
cattttaaaggttcaagnaaacttggagtgggagnggatgggggcccaaaagcccttcttggggaagccaaggccgggttaagcnttgcccatttccgtggtggccacccttttcccaagggaaattaccgccaagggggccgccttgttggggggnaccaaaattaccaaagccttnttgcccanggccgggnaaccnttnaaanggaagccttgctttgcaaaaaaaggaaaa

SEQ ID NO: 4790 - DNA, 114 bp, Homo sapiens
  misc_feature 24: n = A,T,C or G
ctaccttgcattaaaggttcaagnaaacttggagagggtttttggggaaaaatttttgcccattcttgccattggggccaaaaaggaccccacccttttcttcttattcttcac

SEQ ID NO: 4791 - DNA, 259 bp, Homo sapiens
  misc_feature 42, 131, 143, 181, 194, 201, 228, 234: n = A,T,C or G
ctttgaacaagcaaacttcctggcagcctctactagctgagnaatggctgcccgttgacaatgagggaaggaaggaggcaactggagtttcttacacctgcaagaagaacttgaaaatctgccccaggganccaatggagctnggaaagaaagaacctcaccctcaaaatgaaaactgccngaatccagaatgnacttttngttttaacccttttggacacccccagncccagnggcccccccagaaaaaccctttgta

SEQ ID NO: 4792 - DNA, 305 bp, Homo sapiens
  misc_feature 96, 103, 105, 108, 110, 111, 112, 113, 114, 122, 124, 125,126, 130, 152, 170, 174, 216, 229, 255, 264, 283, 286: n = A,T,C or G
gtgtggcaaggcaggcctgaaatgaccaattcaaagtccctcttgttgctactgaagcatgtttgagacctgcgaggaggaggaggcctctatcanagcaaananttngnnnnngtttccantnnnaacnttctttacgggtgtgaaaaacnccctttattttcaaattnctcncagccctgggctcaaaaaaaagggggggaaattcccaagggntggccccccaggnccaagggggaaaaaactggggggggngccccaaanacccccccctcttaaggtnttnaaaaaaatgttggtggggg

SEQ ID NO: 4793 - DNA, 329 bp, Homo sapiens
  misc_feature 29, 44, 53, 76, 102, 139, 220, 233, 246: n = A,T,C or G
tccaagaaaaacttggaaggggtcctttnctaaaaccacaaagnaagcctttnccctaacccccaacttgggtggncttgggggaagaaaaaatttgggatncccccttccaaagcccccttcaagaattggggcaaanggggtggtggttcccattggggggcctggaagtggcccttgggggccaagcaaattcttggggggacccttaaaaaaccanccatttttttcgnggaccaaggggantggcttcttattattcaattcccccctttttttggggccggggcaagccggtggaatgggttaaaaacccctggcttttgggg

SEQ ID NO: 4794 - DNA, 227 bp, Homo sapiens
  misc_feature 30, 37, 46, 50, 61, 71, 72, 79, 82, 86, 122, 181: n = A,T,C or G
gaagcttctctaacacacggatttccgccnggaagcncatcacagncttntcatgcttggnaacaccaganngctcttntgngctntgcttgggaccatcttaaacagtgaaatcactatcnaaaacacaagttggtgacaaaccatggcacttaatatactggtggaaaaggacaaatgnttaccaccggccaacctggaccaggaaggcaaaccgttgttttctt

SEQ ID NO: 4795 - DNA, 508 bp, Homo sapiens
  misc_feature 19, 32, 72, 86, 106, 107, 140, 151, 152, 179, 191, 202, 206,208, 219, 221, 229, 249, 256, 283, 288, 293, 314, 318, 378,412, 415, 474, 485, 489: n = A,T,C or G
ctacctttcatttaaactncactaacttggangctttaccaccgaacccaccattggaaaaatcccacgagngggaagccttgggnaacggaaaccccttggcaanncccttggtgctcgccattcccctttggccccantcctgaagggnnaccaatccaagccacaaagaaaaagcncaccaagggtcngtgggcaagcnttgncnaaaaagattgngnatagcccnttttggtggccccatggccncccaaancccttccccaaaagggggctagacaanggtanattanttgggcattgccatccctttntccnttttcccaatactctccccaaaggcttcttcggctaccaattttggacttaaggggggtntttggaaaatggggtgagtaccccccaaaaaatnttncaaccggttggccttgggaaaaaaaaatttgtggggaattttccccccatatttaattngggggcaaaangtcntttggggggaatggggaaa

SEQ ID NO: 4796 - DNA, 168 bp, Homo sapiens
  misc_feature 53, 65, 71, 83, 85, 97, 106, 107, 118, 126, 127: n = A,T,C or G
aacccttgtggaatagattacatcgtcgtcccccctttactgtgggggggggngaaatgacctcnatgggncatgatcataanantagcccgccgcngttttattnncagaacgatgngcttgtanntaatgaatgagacctcaagaaagcaacgggggggaacgggg

SEQ ID NO: 4797 - DNA, 338 bp, Homo sapiens
aacacacccttcaaagtgctaatgctgttccagctcagcagacacctcgtctcgggaaagccattagaaacccccaaaatactacatttttctcctgagctttgaaccctgaacccagcattctgagagtgggaaccagaaatgtgcatttgaaaagactccccaggcaattctgatgaggagccagtgagcctgctgaaccaggtgactactgacatctcttctttgagtgactttcgaccatcccacaaatgtctgctcgacggtgtcctggaagagctgggtcatggctctcattacacactactcagcatcatacaccaggatttaccttctcg

SEQ ID NO: 4798 - DNA, 275 bp, Homo sapiens
  misc_feature 37, 39, 41, 49, 70, 79, 80, 95, 101, 109, 113, 150, 162,164, 165, 168, 173, 175, 176, 177, 210, 211, 220, 244, 258: n = A,T,C or G
agactatggcccttctggactgtgactcatagactgnananagggccantgagggggggcgttataactnacatcatannttcagggggggcccnactgtnacaatgtnactngaggaacaggagccctctcacgaaccttcctttggtntcccaccccatngnntgntaaantnnngcctaaacgcgccatcatgccaagaagcatganngcaggaacngacgctccagaggacagtttggcnactcttctcggtgncccgctcccacaatgaa

SEQ ID NO: 4799 - DNA, 234 bp, Homo sapiens
  misc_feature 87, 110, 153, 166, 193, 210: n = A,T,C or G
gccaggagtcagccccaggtcagaatgctggtcagcagcagactcacatcccagccctaccttcctgatacctgatgtggtgctcanaaaaacaaggaatcccaggctgntacccagtgtctccatgtgccctccacagatgcactcaactgncctctcttctggntcttcctcctacaaaactgggccaacntgggaaatcagaacagnagacttttgggatggagcatccca

SEQ ID NO: 4800 - DNA, 354 bp, Homo sapiens
gagccgaggtgacgtacatgaacatgaccgcttacaacaagggccggctgcagtcctccttctggatcgtggacaaacagcacgtgtatatcggcagtgccggtttggactggcaatccctgggacagatgaaagaactcggtgtcatcttctacaactgcagctgcctggtcctagatttacaaaggatatttgctctatatagttcattaaaattcaaaagcagagtgcctcaaacctggtccaaaagactctatggagtctatgacaatgaaaagaaattgcaacttcagttgaatgaaaccaaatctcaagcatttgtatcgaactcgacccattatcctctggatttct

SEQ ID NO: 4801 - DNA, 341 bp, Homo sapiens
gcacctgacgttttcaaggaggacctggcagagatcctcatgctctctcactgccctcatgacgtcctcccccagcatcccttccatatcctctctgttggatgccacatacgacagcaaggtcaccagctccaccttgtagatcgcctcatccaggatggacatgatccttttggcctcaatggtgctcatttgggtgaacaagataaagcccgtggaactaggattgaggggaaatgcatctgactctgacgacaaaaatgactggagaatctcttttccttgaatcctaatatgatcatttcatgtcctttttaatgccaccaaccttgggggccccc

SEQ ID NO: 4802 - DNA, 222 bp, Homo sapiens
atgaaagacagtgaaatgaagagttaagcaacatcagcacctctggaaaggacttcagtatgtgagagtttggaatttgaggactttatattgtgtcagatctcctttataatttaaaatacagaagatatcaaaattggatttagggtcattttgatctcctaataattcttgcttctctgttgctaaagagaaccccaaaataaactcatagtacaaaca

SEQ ID NO: 4803 - DNA, 338 bp, Homo sapiens
ggtggtggcagcagaatagaaaggatcagatacaacagataacactgaaggaaaagatctacgacttcagaaagtaaatatttctaaaagaaatagagaagttatgaagcacagattttattgcagcggactggcagtttttactcttagggttggccagctagtaaatttattgcatacctgcgtgtgtctgtggctttcgaactctgaaattgtgcattgactccatgaacaagttaatactgtgagactgccaccctgtggacaaaatatcaggactaaaaccatcaagaattaaagtttcattcatttgcgatttactgtcttagaactgtcca

SEQ ID NO: 4804 - DNA, 260 bp, Homo sapiens
gaaaggaaaaatacgacacatagccatgattgaagacgtgtaccttcatctgagaagacatctgcaaatattctggtcactattaaactttaaagaagaattcactctgctgaacgtgataagaaacagaactcagaaagagggacacctagaggatgaaaacagaagatacaatttcagttgctgataatgtgatattatgcccaaattattcaaataaaaaattcttagaattagttgaattgaatgactaaaaaaat

SEQ ID NO: 4805 - DNA, 328 bp, Homo sapiens
ttctgttggggagtttctagaatccctcttccactccccagaagagcaaaggaaggcttggaagggtagagagactgaggaatcaccttcaacccggccaccatcaatcaaatcaaaggaaaccacagcacctacccccagagccctggctaggcggagatttataatcaatttggccttcctcaacaagcagaatatgttgagtagatcatttctcctctgatcagcctttctcaattaatctcccacaagcctcacaccctgttgtgtgaaagtattcctggcttcaggagttggctccctgctctctctggatgggcctcaaatg

SEQ ID NO: 4806 - DNA, 255 bp, Homo sapiens
cagccccctggtgaaggacccctctgtccagggagaagtcaggagtgaccaggacagcgccagggcacatgcgggacaaaggcccctgggctttctgccctcctccctctgtcctgtgcctcttggcatcttactgggcctagcggtcaaactcccgagaagaaagaaggaaggcaatggatttttaaagttcagatctgttttctcctttaagttgtaaaaatacaataaagataaaactctcaaaaaaaaaaa

SEQ ID NO: 4807 - DNA, 251 bp, Homo sapiens
  misc_feature 50, 109: n = A,T,C or G
acatagggcgtcactatgttgcccaagctgatcttgaactatcctcaggngatcctcctgcctcagcctcccaaaatgctgatctcactcctctataatttgccaaagnatcatacatgtgtgaagggaaaacgaacagaaagacattctcatactggaaagatttagaaggcaatttacacatgtattcttcttaaaaaattacttgaataaaattacagtcttttaaaaaatgaatcaaaacaaaaaaa

SEQ ID NO: 4808 - DNA, 530 bp, Homo sapiens
  misc_feature 420, 421, 453, 457, 460, 465, 467: n = A,T,C or G
gtccccacttgaatcactataattattgaaaatagcagctgatacgtaccaatataaaactgaagacttgctatgacccaggaactctgggaagcatgttatgtaattgcatctgccttccttgctggactctaagctccttgaggacaaagatgtatccattgtgccacttctacattctccaagcctagcagagaaccaagaactaagggctcaaaaacatgtgttgaattaattaagaatatcacaacaaatcctctgaaaaactcagagataagtgacatcatcatccttattttatagatgacaaacctgaaatttgggtcaagaacacagagcctgtgggtgacaaacagcaatccaaaccaacaatcagattcccaaacttgaaaactcatctactctgcctcactgatcaannttgtttgccaggttcaccataaaagagttggnaacnatnggggngngaggagagagacacaagggaaaacatcccttgcttgagacaccctcttcttttttactcactt

SEQ ID NO: 4809 - DNA, 146 bp, Homo sapiens
gaatgaaactgcctttggatgttgcaatgggaccctaaggaatgtcagccaaatccagaacaatgccgagctgaagatctaagtctccatattccgcaagcatgacttttcgaatacaatttaaaatagaaatccaaaaaaaaaaa

SEQ ID NO: 4810 - DNA, 150 bp, Homo sapiens
  misc_feature 23: n = A,T,C or G
gaaaactcataaggactcctcangagctccaccaaggaaaaaggaccaagtcacgttaacaccaagacaatcctcaaaatccagtgtgaattcttagtctcactgacaactcttacaataaaacaaagccttccttcaagataaaaaaaa

SEQ ID NO: 4811 - DNA, 259 bp, Homo sapiens
  misc_feature 191, 206: n = A,T,C or G
ccaacactaacatcctcagctcccttgaattctgtgaattctgtctgcagaatgtgcttacaaggctgggagacatcggcctgcttcagatcaggagctggcatgccctggttacccatggcaacccagctgcacgggagtgctggcgtttgtaaatgtgtgtgggcttaaaattatattattgattctgnctggaagaagatagnctgatttggatatagctctgaataaattactccttatcctttaaaaaaaaaaa

SEQ ID NO: 4812 - DNA, 308 bp, Homo sapiens
cgggtgatgcccgttttcattgatgaggattatcttcttcagcaatgactgcacagcctgcaagaggcctgttttggacattagttgttaatgggcagagcctcaggaatacacttctggagaaagtccactgtcatagaaatgaaaaactggctcctccagatcacctttcagcagcatattaagcttttggaaacatcaatcaggagacagaaaattgatctttcagcttttgagggaatgtatcatcttgagttagggagaaactgccctggatggcccaagctttgctcctgtctcctgtggaa

SEQ ID NO: 4813 - DNA, 637 bp, Homo sapiens
  misc_feature 44, 108, 114, 159, 222, 312, 325, 396, 405, 479, 502, 504,514: n = A,T,C or G
cgaagccttgctgttagcacttaccgagttctacgttctacaanatccaccactggatcttaacatacacgtaagatcaaatgctatagcatgtcaaacaatgtgtanctccanctatacaaacattactgtatctcattggggatacgaagctctacncacttgaagatggggaaggaatataaaaatctatgtctcacagtccagacttggagtacaagnaataagaagaataataacttaatcccttaagtagattcaccataagttagctcaagagcaattccagtgcaagtatggtctgtgatccantagtatcttacanacagcaagttgaacattgtgggatgcatgagctattgaggcctttgcagctttctgctacatggaggctanggccagagncaagatttatgctttgcagcacactggtcagctgtttttgcaaatcaagattaaatgatttttaaatgggggcngccaacatgggagatactaatgngnggttccttgngagctactgcataaagttaggaaattggaatacagaaagatgaaaagtgatttgcccaacatatagatcaaagctggggcagaaccaggactgggacctatatctctctactaatgggttttt

SEQ ID NO: 4814 - DNA, 279 bp, Homo sapiens
ctgcttctgccgccatcttggtacgggagcgagagccaggtgcttgacaggaccgggaaagtgtaaactccgcggctgacccggaacatccaccaatggcagaagagaagcgcttaggcgcggaagtgaaaaacccaatccctggagttaggaggcgggactgagactcagctggaggctgaggctcctgtcctctctaagcattctgggaaatgtagttcttctgccggtcccgggcatgcctggacaataaaccaagggcaacttcaaaaaaaaaaa

SEQ ID NO: 4815 - DNA, 197 bp, Homo sapiens
  misc_feature 28, 29, 70, 73, 76, 79, 80, 82, 90, 93, 103, 110, 115, 118,122, 130, 135, 157: n = A,T,C or G
gcccttccagactcgcaggagcgtgttnnaacatcaggttatgagagcgccttaccaacaatacacaaancgnggnccnncnaccttcgntcnttgggacatncccaatnctccnganctgngatgaaanctaangttgtgcttaaccacgattaanaattaaccttacttttccttacccccaattaactttttcc

SEQ ID NO: 4816 - DNA, 227 bp, Homo sapiens
  misc_feature 35, 47, 51, 102: n = A,T,C or G
agacgctggggagctcctggttaaggcgaactganagatgtgaagangttnggcttggtatgccatcacctattcctgcgaaatacattgactactggaccnttttgaaggacgcgtttggcttagaggaggaataaccatgccagttttggtcaattctctatgatttacttctctcattttgccacatttactttagtagatataatttcattaaaaacaaaaaa

SEQ ID NO: 4817 - DNA, 318 bp, Homo sapiens
gtgatgagaactctgtatgggacacacatatcaacagctggtagacgacgcaggactccggagtagatgtggcattctgccttcatattattctcaatcagactggtgtttgagtaactcacaaagaagttcagaagccactgcgccagccacggaggtacacggctcaactctccttccagacagaagctgctgggaggagctccagctaccacagcagtcattctgaggctacgccttccccaggctgcttctagccaataactcagcacagcagggagactggaggtgggacatttctgccaacatgggacccgc

SEQ ID NO: 4818 - DNA, 371 bp, Homo sapiens
tgaatagccatggagctcctaaaaagaatgggacctttcacttgacctcccttctctcccttgcctactgcccctgagcgagtgcttcagctacagtctgggagccgaagatgcctgtgtttgatgcctccagcaccctgtctctgcatcttgaatccagccacgtgaccatctcttgcccacctttggccaatgtccctgagacatttcaagtgcatcatgctgcagactggtgttgctgtctccacaataccgcgcttcccctgtgtccccatctcagtctttggtcccactatccacttcccacatgcagccattgagtcctctatttttcttccttaaatcttcagaatctggttgccaaaaaaaaa

SEQ ID NO: 4819 - DNA, 255 bp, Homo sapiens
  misc_feature 82, 96, 108, 117, 138, 141, 148, 149, 154, 155, 156, 160,163, 165, 171, 187, 193, 196, 199, 201, 220, 227, 233, 236: n = A,T,C or G
tgggccctaaattgcattccaaagaccctgctcctggaacagccttatgcaatcaacacaaactcttggaggttttactgcntctggcactcgganggtgggatgctntcactctgnccctagcacaaagagcttgtnccntacacgnncaggnnnttcnacncncgacanaataattggatttcangcatgnccntcnanggagagcgtgagttttaanggtaagncttgcnccnaaagtggcagagctgaaat

SEQ ID NO: 4820 - DNA, 102 bp, Homo sapiens
  misc_feature 24, 39, 45, 53, 63, 78: n = A,T,C or G
ttggatttcaggcgagccaatatnaggagagtgaacctnaaaggntaatgtcntgtgcccaanatcacaaaagctgancattgtaacacatatctgcccgat

SEQ ID NO: 4821 - DNA, 110 bp, Homo sapiens
  misc_feature 16, 20, 26, 42, 84, 94: n = A,T,C or G
aacgcttgaaggtcanaatncaaggntcatcaccctgcctgnaaggagcctgatctcattcttatgccatcgtgaggtgctaanaacacatatnaatcacgcatggcctg

SEQ ID NO: 4822 - DNA, 107 bp, Homo sapiens
  misc_feature 26, 56, 57, 81, 88: n = A,T,C or G
tactgccactgaacctgttggttgcngagtttgaagaggtccaacaaaactctggnngctggaaggcaatgataacaggtntacaganaaagaagtcaagagcatct

SEQ ID NO: 4823 - DNA, 190 bp, Homo sapiens
actgaggatctgatgacttgcaacttaactaaggagaagaaaaaatcaagagggacagagagagaaacagataatgttcttcatagatctctttctaactgtgtcatcctgtcattgaactcccagaatttctcttaaagtgatgccttaagatcatgggaaagatcaaaattaatgaacaacaaaaaaa

SEQ ID NO: 4824 - DNA, 197 bp, Homo sapiens
gtcaagaggcttcaccagttccttgtagaaagaaacacacagaagaaacaaacacaacagcctgcagtggagcgtccttctcacgtgtgtgttactcagtgaagagagccacgtacccaactccccgttttccttcatccttcaaagcagccctcgatggaccgacttcccaattaaaaacaaatccaaaacgtgaa

SEQ ID NO: 4825 - DNA, 174 bp, Homo sapiens
  misc_feature 19, 53, 55, 67, 88, 91, 108, 128, 137, 141, 142, 151: n = A,T,C or G
agacacagccttgctctgntggccaagctgggggtacagggggatgatcatancncaactggcaccntgaactcctggagatcaagcnganccttctgcctcggcttncaactagctagaactacacnacttggcancccnnaagggttanttttaattttttttttaaaaacc

SEQ ID NO: 4826 - DNA, 139 bp, Homo sapiens
  misc_feature 20, 21, 33, 37, 66, 76, 83, 107: n = A,T,C or G
aacccaagccctccacaccnncagtggggccanctgnacaggagcggccagaaagggagagggccncggggccacngcccttntccttactctcagttcctgacttnattgtcacatcatggcgagtaacaggacaacc

SEQ ID NO: 4827 - DNA, 233 bp, Homo sapiens
  misc_feature 37, 46, 47, 73, 76, 140, 147, 149, 194, 196, 203, 217: n = A,T,C or G
tgttagacttatacacgagtgactttctgtgacgcgncccgcatgnnccctttcacgagagcactataaggantanccccgtgctctctggtacacctcacatacttgcttggcacacctctttcctctcatcaccgcanaatgccnangacgaaagaaaggtgactctcatgtagccatgcacaatatagctnantaaatcnatacccatatctanccattattttgtgtaa

SEQ ID NO: 4828 - DNA, 433 bp, Homo sapiens
  misc_feature 28, 349, 392: n = A,T,C or G
ctcctatatgtgaagagtggaacatcanatttgaagcctgatcgcaacttgaaggcctcatctaatcacacagcttgtgtgcctgggccctgagtggtattggcctaaagcataatgcaattcaccctgcatttacattcctcttcatctgatttgccggagaatctggatttgttaaggatctcagcttattttcctcaggcagatgctcttagtttctcagcaatccagcagtggttacagagcctgggtctgtaggagatgaggggcccagcactggagggggggctaccttggaagacagctcctcccatccccactgatttttcaagtcaacgggggtaatggnttcacctagtcctgggggtttcttgaggccactgtgcactcantagcaccatcagtcctgactcccttaataagaagaaaaaaa

SEQ ID NO: 4829 - DNA, 167 bp, Homo sapiens
  misc_feature 23, 39, 43, 56, 57, 66, 68, 69, 79, 83, 87, 104, 109, 129: n = A,T,C or G
atcatatgctcactgtaacctcnaactcctgcgctcaancganctttctgcctcannctcttgagncnntgggactacnaggntatncaaccatgcccagctangatgntaaaatttaacgtctatacncactatctattataaatgttgattcctaaaaaaaaaaa

SEQ ID NO: 4830 - DNA, 119 bp, Homo sapiens
  misc_feature 20, 38, 48, 75, 76, 85, 101: n = A,T,C or G
tgaggaaaaatgaccccganaagcttttccatggccanatttaccatngctttattgattcaaacattttaaatnntgatctttnggagatgtgggaaccntatctcggtaagctcttc

SEQ ID NO: 4831 - DNA, 129 bp, Homo sapiens
  misc_feature 31, 36, 78: n = A,T,C or G
cacagggactcaagctcaggctatttcaagnatcancctatggcttcacagcccttgccgatcaaaaactgcgagaanaaacctgaacagaattggtggatgagcctgccaatatcttgcgcacaatgc

SEQ ID NO: 4832 - DNA, 251 bp, Homo sapiens
  misc_feature 20, 24, 42, 83, 113, 120, 127, 134, 191, 195: n = A,T,C or G
tcaggctatttcagcatcancctntgccttcacagcccttgncgatcaaaaactgcagaacaaacctgaacagaattggtganagcctgccaatatcttgtgcctcatccganagggaangaagctnaacagtntattgctgactatgagctataaattggtcataagatcttgttagataaagaaagctntctnatattcttagcttgctggttttttaaaaatcatgaatggatgggattgctttcaaa

SEQ ID NO: 4833 - DNA, 164 bp, Homo sapiens
ggaagcacgaaagggatgggaaagggaagcttggggctttcattataaccatttgggaagaagtaagccaaggaccaaaccaaacttccaagcaacccaaaataaactcttgtcttctttttaaagtgtgttattaaaatggacttgcatcaccaaaaaaaaaa

SEQ ID NO: 4834 - DNA, 156 bp, Homo sapiens
  misc_feature 40, 45, 48, 61, 64, 80, 84, 90, 94, 97, 113, 115, 116, 134: n = A,T,C or G
gctgtccagaactttttccagaagttgccggacgtcgggncaagncgnctatatcacctcnggngaagggattactgccncctngccgcntttnaangaccgtcttatgaatnanncttggcttttccccaagnggggatcgctttcccaaaccaa

SEQ ID NO: 4835 - DNA, 178 bp, Homo sapiens
  misc_feature 24, 25, 48, 53, 55, 61, 75, 77, 88, 91, 101, 106, 113, 117,118, 119, 130: n = A,T,C or G
taaacacccttgtgatcatccaanncagtggcgagtatcaggcagctnattcntnttattnctcaaacggggggncnggggggttganggnccacaaaaanactanacctacngacnnncaagaggcatntgctgctgtttccaacttggagctgttatgaataaagcttgctacagg

SEQ ID NO: 4836 - DNA, 162 bp, Homo sapiens
  misc_feature 34, 71, 86, 109, 131, 133, 138, 140: n = A,T,C or G
agtgcgtgccttgtgaatgggccccggggagganaaactgaggaaaggggaggaagtacgttgcttgccgnaaagggaggagaaantgcgtggggagagagtcttaccnttttgccttgccgggttggccngnttgtnancttgagcccggtgactcacagc

SEQ ID NO: 4837 - DNA, 328 bp, Homo sapiens
  misc_feature 34, 51, 73, 75, 83, 98, 107, 123, 124, 145, 162, 180, 182,188, 190, 215, 242, 254, 268, 279, 285, 307, 308: n = A,T,C or G
gatccaatgatccaactccagaaaaactcactgnatcgaggtgaacacagnctctttaaagctcttgccaacnanctgctggncactttttgctgatngtcattcangcactttgacaccggnncctgaagctattatcacaagnggcctattccatacttnattcaacttttggggagncnaccaangngggtacaaggaccgaatgtaatcantatcccaacgaaatgcaaaacgaggangcgcctaggcangaagcatctttganaggttgtaccnggtatntaatacaccatggaaggtctgnntttcccattttttttttttt

SEQ ID NO: 4838 - DNA, 175 bp, Homo sapiens
  misc_feature 16, 63, 68, 72, 96, 107, 133, 138: n = A,T,C or G
ttgactcatgaagggngagctgtcagtggttgtgccacaagcctttgggcaagtccaggattncccancccnactttggacacagttgcctttgtnaaggctcttgngttgcctctgaatttatggggagaangacancaagtctggggttactggcccttgcattaaaaccttt

SEQ ID NO: 4839 - DNA, 645 bp, Homo sapiens
  misc_feature 26, 32, 37, 132, 175, 218, 280, 377, 433, 456, 460, 507,535, 550, 551, 559, 569, 572, 580, 587, 588, 600, 612, 628: n = A,T,C or G
gatgagggaaaggacaggccatggcngaaaancccgnccgctggagcgcagcaccaacagcttcagttactcatcataccacaccctgggagggagatatatagctggtatttgacaactttgtaatgggancattcccggatattgtctcaaaaattcaagattgggcaaacangctttttgaaaaccagtccattcttgtccttgaaagttcaagncactgggaggtttctcgggcacccagccatcttgggatcggaacacttgggaaatttcactncccggggaagtgggatcacccattgccacccgggcatcttgggacttgccaataaagaatttgtcaagtggattatgggcaaaaagaaccggtggtncttgacaagacatacttggaagtggccatgggaacatctttcattaagaagctcgntcacaaaaacccttgatgggggntttngcttttttaaccccacaagccaattgaaacccggctttaattgggcngggaaagaacaaaaggttcccattcaanaaccttgggaaaatnnttttttgncattcgggcnggngggaattnttcaaannaaggggaaaacntgggaaaggtcngggttttttttggganggggaaaaatggggttt

SEQ ID NO: 4840 - DNA, 182 bp, Homo sapiens
  misc_feature 125, 153: n = A,T,C or G
cctggagtattgcaccacccaccaccaccaagctaatttggattttttgtaaggaaggatggggggatctcaccttttgtttgcccaagaggcttgggtcttcaaaactccttggggacctcatngccggatccaaatttaccttttttcatnattaattggaccctttctcgttacctaat

SEQ ID NO: 4841 - DNA, 170 bp, Homo sapiens
  misc_feature 19, 38, 47, 54, 63, 70, 93, 94, 104, 125, 130, 133, 147: n = A,T,C or G
cctcggtttccccctgggnctacctgcttaatcagaanctgaggctnttcagtngatgttcantagtcanacaggacaattaatcagcaagtnnaaaattgaangaagatctgcatcttactgcnggagntcnttaaaataaaagcngatttggcgccattgaacattca

SEQ ID NO: 4842 - DNA, 266 bp, Homo sapiens
  misc_feature 62, 173, 174, 189, 211, 213, 221, 223, 242: n = A,T,C or G
gtgggaactgagctcgcaggagatgcatttaaaaaaggatcccagggctgcccactctccanaaagttccacccaccctggccattggaaggagacagagaagcattcttcactggggcccagagctgactccttcttgagcgggtcaccctggttatgcataagcttcaccnnccaaatgaaccatcnaaatggtgcgccatttaaatgngngctatggncngcctcttttggtttttacnctggaagaaatactcataagccac

SEQ ID NO: 4843 - DNA, 211 bp, Homo sapiens
  misc_feature 100: n = A,T,C or G
gtgagaagagcaaagtgaaaaaaataaccaacccgaaagccaattcatctgactcgggcctggctctgctcatgacatcgtcatggatggaagctcccantggctggatcacactggaacgcccaccccaatatttattttctttaggtttttcccagaaggtggttttcaaggaaataaaacaagcatcttcatttgtcaaaaaaaaaaa

SEQ ID NO: 4844 - DNA, 281 bp, Homo sapiens
gtttaccttccttgtcagcttgtgagcaccagaaggcagcaagttctcccatgcatctaatcttttgtgcgtagcacatgggaggaggcgatctacaaggatgcatattaacaggacacgccaactactgcaactaccatggaacccagccggatttccctgtcttctgcttccttcttaaccctcccactgcttcttttaccttcttccccctttttataactcagtattaatttcttaaaagtgtataaaggaactgagtggatatgtaaaaaaaaaaa

SEQ ID NO: 4845 - DNA, 278 bp, Homo sapiens
gataagaacactgattcccagccatggtttggagttgttaggagagctttctgatcatccaaggactcttaaggaattcgccattttaagtcctctgaaaaaaatacaggaacttctttacagaggaacatgcggagagagagaggagaaccaccttcttatggaactaccattttaaatctcaatctatcatgaatgttcggtattttgtttccaccgagaggggaaaatagctttaaatataacttccaggcctgctagatattcaaaaaaaaaaa

SEQ ID NO: 4846 - DNA, 286 bp, Homo sapiens
tactcccttgacgacagaagcactccctcacagaaggagccgtccacctcccagagcttccttccacagtgcaccaaggcaatgactcagcacaaaaccaaccaccaggcccccccacgtgccctcctccccaaccctgaactagtttcagcaatggaggagaaagagcagccctggtggggtcactggaagacgaggcgccaagaactcctaggtctgggaacccatcaaacccccctgccaagaaaccaaaccgcacacataggccttcaaaagcatggagact

SEQ ID NO: 4847 - DNA, 332 bp, Homo sapiens
aatccaagctcacatccaggacggcgctttccaagaaaaagcaggatgtgaaccaatgcagaacacatgccttcacctttccaaagctacagacggagaccttgccctccccggtggccagagccagggatctctgctccctggacttccaaaaggggaggacgtcggtcaggaacagcagctgcagcacagccaggcttctcaggtcatcggcatccctgcaatccacagagcacccacccaaactagcgactaaggaggggcgaggacaaagtgggccattcgtaagaacctataaataactcatcctttggagtccgaaaaaaaaaaga

SEQ ID NO: 4848 - DNA, 261 bp, Homo sapiens
gattgcaggagcatgctctttcttaccacatggaactttcactcatatttccagtcccccctcttcagaattccatcctaatgtagcatatctggtgcttctacgtcctgttctgatcaccccatcagcccctgcagccgtgtgttcctcaactccaagtgtttaaaaagagagcgttctggtttatcgttccagtgatacctaactggtcaaacaatgtaaacaatacaatgtaaataaaacactgccaaataaaaaaaa

SEQ ID NO: 4849 - DNA, 145 bp, Homo sapiens
  misc_feature 24, 29, 42, 45, 46, 67, 68, 69: n = A,T,C or G
gggattggattttttcaaggaaanaatcngaccattatgaanganntgtatgttactcatcagaaannnctacccccccaagcccttgggatttgaagccctgggggatgacccgggggtttggcaaaggggaagaagctgaaat

SEQ ID NO: 4850 - DNA, 280 bp, Homo sapiens
tatcatattggatctcaggagagaagaaatactggatcttttttcccaagacgtatgagagaaaataggaaaataaagacaatggaagaccagttctcgagatcattttcaatctggctttgcctatctgtctgtggtcctcaacacggcatcagtatacttctctccatctgcaactttaccagaacaacataataatgctaccattaatactttgtccaagacactgtgctaaattagcaataaatatatatttactttaatctccacaaaaaaaaaa

SEQ ID NO: 4851 - DNA, 111 bp, Homo sapiens
  misc_feature 18, 21, 55, 62, 70, 71, 81, 90: n = A,T,C or G
tgtagagggatgaactcnctnacacccaggatttgttgtttttcaggggaaaagnaaccaantttatccnncactgaaaantttctgaantaaaaaatgcagtttcattga

SEQ ID NO: 4852 - DNA, 397 bp, Homo sapiens
  misc_feature 62, 64, 65, 77, 79, 95, 106, 108, 111, 125, 127, 128, 131,134, 135, 141, 147, 155, 171, 185, 188, 200, 214, 237, 238,281, 308, 315, 319, 321, 327, 334, 343, 358, 363, 367, 368,370: n = A,T,C or G
atcacttcctttaagggaaagccagctgccatgtggtgagtgtcaggcctcttgagcccaancnnaactacgggggngncctctgagaggggggngggtacctccntnctngatgggccgggaangnnacntgnnggaatnccccanaaggaagnggaaaaaagaggcccnttaacttggatggncgnttcccacccatnggggggattttggntcctgcccccactccttactggnnatgaatatattcttccccctccacccccacttaaagaaagggngctttgcaaatattctccccactctcnggggaangggnangtgggnaaccccnttctccccncccctcttttgaaantaaantggnnanattccccccccacccccttttggggga

SEQ ID NO: 4853 - DNA, 114 bp, Homo sapiens
  misc_feature 39: n = A,T,C or G
tcaaatgaacctgctgtgttctagaacaacagactacanagtgcctgttttcagtgtgaaacctggaaagtgcctattatgaaagacaggatgtcagaagaccttcatgacaca

SEQ ID NO: 4854 - DNA, 109 bp, Homo sapiens
  misc_feature 33, 37, 60, 63, 70: n = A,T,C or G
gtagaaattcatgcctggtactggaaatgcggntaanactgatggctcaaatgaacctgntgngttctanaacaacagactacgagtgcctggtttcagtgggaaacct

SEQ ID NO: 4855 - DNA, 432 bp, Homo sapiens
  misc_feature 35, 46, 71, 81, 312, 363, 371, 398: n = A,T,C or G
gagaggccacagctgacggatggggaaacccaagnccagagtgttngatggatttgaccaaagccacccanccataggcangaggtgcagagttgaagcccagggcatgtgattcccaacaaattattctttccaccagaccacatgattcttttggattgaggccttttctgctctttccaaacagaagacatcaagttgttttcagaggcagggaaaactttgctccatattttgagatcaggaggtgagaagaacttgagtctgaactctcttcttatagtttcttaaacttaggtaactactactggngactgacttttggaatcgctcaaactggccccaggatgattcctggggaanaaatgtcngggtgatagaccccaagagggccaggntttgggaaaaaaataaactttaagggccggccct

SEQ ID NO: 4856 - DNA, 475 bp, Homo sapiens
gaagccccccctcttgagtgcatttccatagctccaggatgaacatattcatgaaacttgagccaatgaaggaaagatacccatgtggattggaccaatatgcaaacttcaaactgtgtcattatatttttattttatgaacctccttgcttaacatctcatcccacccagattataacctgcacaaaagcaaagggaatttgttgttctctcttgttcatccctgcattcctgatacctagaacagagataagcaaatattaggtttttagaagcccagcagccaccctcactctgaacaagctgcctatttgttatgctgagtaaaagcatgatcacagcaacaaagaaatatcattacagagaatttagtctcatttgcaaaattttgcagcaaggacaaatataaccaatgaaacaatttgaagcagaagtttgtgagtttcaaataaaatgtgggtttaaagaaaaaaaa

SEQ ID NO: 4857 - DNA, 206 bp, Homo sapiens
  misc_feature 29, 33, 39, 45, 46, 47, 58, 67, 70, 96, 108, 114, 115, 117,165, 166, 171, 179: n = A,T,C or G
ggaggttggtgggatgctgatatcattantctngagctntctagnnntgtcctggctncctgcacantcnctcttatcaatttcatcacattgaanggggggggcggngccccnntnctacacaaaatgggttctcactctgttgtaagaaaaagggcggataanntcggnagttgttncatatccttccacctctggcccaccat

SEQ ID NO: 4858 - DNA, 355 bp, Homo sapiens
aaggaaaatcaagaacatgttccaaattctttctacggaacttcagaaacataagcaaaattcttctggataacaaatcatggcttcctatcaactctaggattggacctgctgtgtgtggtactgggagagatacagcaaagataatcaaatgtgaaccatgccctccaagagtttacagctctgtaggagagataaatgtagttaggcaccaataatacaaagtagaaagtgataaataccacaagaagggctgagacaaagtacagtgctggcaagttctggaaaaggggtggacacctagaaataatcagtgaagctatgagatgagagacagagagagagagaaagggag

SEQ ID NO: 4859 - DNA, 237 bp, Homo sapiens
ccgttgccactgccccatgtaagctcgaggagggagagatgtccgtcttcttctctgatgagtccccaacccttgaaccgctcctagcacacagcaggtgctcaagctgaaagtccgcacagaccccttgggagaggccttgagcacgcagcatctcatctcatcagagcatctcctttcgtgtgcgtttgattaaacacctggaaaactggcttatctagaatttaaaaaaaaaaa

SEQ ID NO: 4860 - DNA, 372 bp, Homo sapiens
  misc_feature 282, 302: n = A,T,C or G
atacgcaactcacgaatgcgaagcatgcagatgagaaacccattaatgctattgttataaattcagtatctgacttcaatatcacagatggaccagccaaggaaaaccccaatgagaaaaaactgtcagaatccagcacatcactgtcctcccttgaagaatgccaaacaacattttcttacctccaaactgatacttcagttcatcacagagacactgatggtatgtttctcagaattcaacccatctctaaataaagctcccaacccccatcccctgtanaatcatcacatatgctgttnggaaaaaaaaagtccttatgaatattaaacacgaagacttcgatttgaaaactctgaaaaaaaaaaggga

SEQ ID NO: 4861 - DNA, 330 bp, Homo sapiens
  misc_feature 21, 27, 38, 55, 92, 197, 198, 214, 224, 269: n = A,T,C or G
ggccttggggaaagaacaganggccanaagcctgggangtggatggcttggctancaaagcccgagggaaaccccaagaactggaagggcangggggatgcttttcttcctttcaagaagccctcccaagaaagggaaacccttaaccccttggccttacaccccttggatctttgggactttggcacccctcccannaaacttatggagggcnaattaccgtngttttttttgcttggttttttaaagcctggccccttgtttttttngtaccttttggttaacaagccaaccaattacaccctttttgaaaatggtgaaaaaaaaaaa

SEQ ID NO: 4862 - DNA, 223 bp, Homo sapiens
atattactcgatgaagatgtaatgtttggagctgcagcgatcattttggaatcatgaggcaatcaacctaagaatgaaagccaacaagttgaagaaagcaggacagaataaagaccctggattcttggtgacacttttggtttccaaaactactctgagatggccagctttgaacttaccaagtcaataatgaaagcttgtatggtttaaatcataaaaaaaa

SEQ ID NO: 4863 - DNA, 111 bp, Homo sapiens
  misc_feature 19, 24, 37, 47, 48, 53, 57, 64, 78: n = A,T,C or G
ttgaaacccctggggtagntaccncgcattaagtcancaactgaggnngaggnctanagctgcncttgggtgtttatncagccaacatgtgatccacatgaggaaaccccc

SEQ ID NO: 4864 - DNA, 630 bp, Homo sapiens
  misc_feature 17, 54, 55, 66, 69, 70, 73, 77, 88, 94, 109, 124, 138, 140,184, 195, 198, 201, 210, 233, 248, 356, 359, 372, 454, 473,482, 488, 508, 518, 587: n = A,T,C or G
ggggtttagcctacccncgccatttaaaggttcaggaaacttggagggaaaccnntgtgagaaccngcnncanccanacattaacttngcattnaggggcgcagctctnatcaatgcgtcttcncatagtggtgtgcnangatagggcgaacataggatatatggcgagaacgtgtgggtaatntcttatagagnagnganacaatgggnttggggtaaagcctggtacttanttatgccgtatagantatatactttgccaccagacccatgtaatattagaacctgtcaattaccaccctaattattgcgtatctatacaccaacatttttaaaaccaccggacaatttgagcnaanaagatttctcccnaagtgaagaaaaggaaagtacatatgtcattgtatgcacaccctcttcaatgcataattacgtgtcttaccactactttganccccctcacgtagtgcaancacaccgcngagagncatagtttacttatatgtanacgccttgangggatgcgcattaaccagtgacgtctatggaggattatttgtacatcatcgataaggttaatttaaacntgagtcgtcttttccatatattgcggaaataattaaaaaaaaa

SEQ ID NO: 4865 - DNA, 488 bp, Homo sapiens
  misc_feature 35, 36, 49, 59, 63, 169, 207, 246, 359: n = A,T,C or G
ccttacccccttggccctttttaaaaggttccaannaaaaacttggganagggttaaanaaangggggggaaagaaagttttcctttggaattggccccaaagggttaaccctttcccaaaaaaagggaaaggaaaagggaccccaatttgggttgggaaaaaaaaccncgggaaacccagggaaggaagggaattatttggccccnaaagggggaaaaatgggccttgggaaccccatttaaaanttccaagggaaaaagcccttaaaaaaaaagggaaggggcccaaaaaaagggaaaaccaagggtccctttctttctttcccctttaaagaaaagcccccttccccaaaggaagngggggggccccccttcccaaaaatttaattccctttttgggaattttgggcccaaggaaaccttttttcctttgggggggccttcccccaaaaaaaaattttttttttgggaagggaaaaaaggaaaaa

SEQ ID NO: 4866 - DNA, 539 bp, Homo sapiens
cgtcttttcccagtgcaaatttccaaccagaacactgccaaaacagaagaaaaacaactaaacctgagcctatcacattcaggaaagtctgaggacaaaggaatggtgcaaaatgactacagactttggaagagaaagaagaagtgtgagatggggtcgtggatctggcccacatgtgaatgactggtcactggtcgtctgccagaaagaaactgggtaaagcttaaaaaagctgaagaaactgaggttccaagtacttatggttgttcaagattaagcaaatagcaagctgcagaatcaaaatgtgactttcttgaatgcttttcctcaacaccagttgcgaacactggaagtattatatatgaaggcattggtgtatataagcatataaatcatcaccatcatcattaaaatgaataaactgacgtctttcatttcaagaaatcataaaaaggcagaatgattctcttaaaccaaaaaaagcatactgagtccctgctgcctttcgaaatggatgctgtgtcagctcaatcaagaaa

SEQ ID NO: 4867 - DNA, 252 bp, Homo sapiens
  misc_feature 28, 29, 44, 58, 59, 72, 99, 111, 126, 127, 128, 131, 134,138, 160, 215, 220: n = A,T,C or G
tctttttttttttgtgcccccggcgtcnnggagggaggggcgcnaatggggcacccgnngtattttgtggantttaccacaccacaaagcctctttgtngattttccacangggaaatttacaaannnccnttntttncccctcgtggctcttaaaaagnctcttccccaaaaaaaagggggcgtggggggaattttattgagggggcggggggngaggnccccacccccacccgcccctgtgggggcccaa

SEQ ID NO: 4868 - DNA, 737 bp, Homo sapiens
  misc_feature 21, 108, 112, 157, 201, 283, 306, 353, 363, 370, 385, 495,505, 575, 581, 600, 606, 627, 696: n = A,T,C or G
tacccttgccattttaaagtncaggaaaacttggagggcattcttttcccacttttggaaaaggttccttggagtcttccccttatttgggtctcaagctatttgggnaagnaattaaagagcttgtggggatccttggattttttggggaccaaanaatgccaaggaaaaatttggaaataccacattattttgttccanggggaaggatgggggggggggaaaaatttttggtttttggaccatccgtccaccaaggattggaaggggattaccaccaaanggaaggggggaaggtgcattcanaaattttggagaaaaaaaagggggaccattttcttcacccttggatnaattaaggtngggccanaccttttttggtttncattcaaaaattaccacggcttttttttttattattaaaaaaaataatttggaaggttttgccaaaccctttttttggttccaaaatgggaatgggaattggaaggaatnatttggccanttaaaaaccttcttcccccaaccggtccttctttttccccccaaggaacaaaagggaaattttggaaccntaaccntaatttaattttgggaatncaattnaaaaaaacccttgggaaggtntttttaaagggggaaaaaaccccttgggcctttttttttttccaattttttaaaaaaaaattgggaatngggcctttttgggtttttcctttgggaaaaaccaatttcct

SEQ ID NO: 4869 - DNA, 408 bp, Homo sapiens
  misc_feature 19, 27, 30, 42, 62, 90, 92, 94, 98, 109, 114, 129, 130, 133,135, 141, 142, 149, 169, 183, 186, 191, 241, 244, 256, 264,270, 280, 290, 301, 373, 383, 385: n = A,T,C or G
ccccccccttttttggaanaaaccccntcntgtgaaagcttncctagcttgttaagagttcnagaaaacttggaaagtaatttggtgcanancncatngtcgtgaaaanttggnaaaatatacaagggnnttncnttggtnnttattgnacaaaatggggacctagganccccttatggaaantgnaaatntttgccaaaggcaccttgggcaccaagtgtaaacaattattgcttgccanaancaaaccccattnttttcaangaacangtggttaagnggaaacccanaccttggtggnccagcaactttaaaacttggaccgaacacccttggaggggttggaaaattcgtttccttattttggcccacnaaccaatttncnttggaattctttcaaaggggggt

SEQ ID NO: 4870 - DNA, 306 bp, Homo sapiens
gattgtcaacactgtggcaattgaaaataacaggaataactgttttatgacaaatggacctgaaccctatggaatgaatttgcaagcactggcacagttaacatatgctacaaacaaccatcttcagacagtgtagcgaaccaactgtgccagacttaaactgacgaccctgaggtgaatcgttctattgccacaacatttctgatcttcaaggctctccatgctcctaaactcttttctttaatattctacagtgtgtttattttcacggctataaagtcatactcagatttgcaaaaaaaaaaa

SEQ ID NO: 4871 - DNA, 293 bp, Homo sapiens
aagacacacccagcttcctagagctctgaagcagcatttgatcgcgtgtggctgaggaaactcgagcttgtagctgataaggaatcgggaggagaggccgggagggcattcctggggtgcttggctccagctaccccattccaccagggcttcccacccctctggaatcctagcccggcccctgcctgcttttctcccgggtgaattgggagggctgccccagaggaattcaggagattccctctcttgtagcctggagaaataataaaaatattagcaggcaaaaaaaaaaa

SEQ ID NO: 4872 - DNA, 215 bp, Homo sapiens
  misc_feature 69, 76, 79: n = A,T,C or G
ggtcctgtggcaaggagaacagcctgaggaagaagtcctccagggtctgatgaagatggatggaaaganggaacanacnacagcgtgtatactgggccagaaaggcttgtcttttccccatgggataaaatcattttctggtggtcagattgggtggagtgaggaactgttatcaatattatgataaaattatgttctttgctgaaaaaaaaaaa

SEQ ID NO: 4873 - DNA, 439 bp, Homo sapiens
  misc_feature 136, 164, 386: n = A,T,C or G
cttggccaaaaccccttccaagggaaaagggaaccaagggaaggaattgggggggttttccttccaacctttctttggttttggccccccaaaaccccttggggttccttgggggaaaaccttccccccgggggcnccttccaaaaggccggaaattccccttntccccaacaccttttgggggggccccaaccccaatttcaatttaaaaagggaaaaccaatttcaaaggccttttccccaacccggaaaggggggggttaaaaaagaggggggttaaaaattgggttccccaacccccctttggggggtgccaacctttgggcgttggggtgaatttccccccccccaaaattggggccccctttggggggccaaaaccaaanggttaaccttttgggggggtcccaacccaaaaaaaaaagggttaaaagggggg

SEQ ID NO: 4874 - DNA, 118 bp, Homo sapiens
  misc_feature 22, 45, 47, 58, 67, 70, 71, 100: n = A,T,C or G
ggaggccacagttctcaagggnaattagtctacagttccagccantncaagggacagntggaaaccnccnnaagcttagaagggagattttacctgaaanccctttaaagggcatacc

SEQ ID NO: 4875 - DNA, 546 bp, Homo sapiens
  misc_feature 466, 484, 496: n = A,T,C or G
aaatgtagcctggcaaaaaacgtggggtggcctcagcagaggaaatgctgccagctgaaaacaccggatgtaatcgagaccacaagagacacagacttagttataaatgtcgaactaaaaagagtccaggactggaacctgtttcacctctccttgcctaagggatggccctgtgtgacagtagaatgcagaagtatggctgagtgactttcagatctgggcctgaagaggctttcagccaatcaccctgtaaagaaatctgggctagtctgccttccagttagaatccacatggaaagagaggctgtacagaatgagaagctacacagaggagaatggaggcactccagtcaacagccagacaactgtgaggcatgtcaatgaggccatcttggacattcaatccccagcttgactcccaactgcatgcagctgcctgagtgacccacccaagtcaaatggacanaagaacccccacttgatnccagccacccangaaaatgcaaaaatttaagtcatttttaaggtttaagcattttttaagca

SEQ ID NO: 4876 - DNA, 160 bp, Homo sapiens
catcaaacatggagagcccgtgttgagatggtggaactacaagatgaaagcagcctgaatctctggttcaactgatagcagagagcctatgccaacccatgtctgtttttttcatgtgcaaaataaataaatatttattgttataagccaaaaaaaaaaa

SEQ ID NO: 4877 - DNA, 310 bp, Homo sapiens
  misc_feature 46: n = A,T,C or G
ctaggtctgctcaccccactcctggatactccattcttcaagatgncttactcacctccagccaaaactactatcccttccatagaccacaatcaaaggtatatcgagagacactattgcaatttggtggcagacaactagacaggccttcagtcacctaaaagtacttgcatgtttcaaagaggagactgtatcatccaactgatttcaagtctataatcaaattgatttcaggccacacttttgcacagttggtgggaatgtaaactgataacaaacattaaaaaaacaagattcatgaaaaaaaaaa

SEQ ID NO: 4878 - DNA, 435 bp, Homo sapiens
  misc_feature 57, 58, 71, 88, 100, 127, 141, 162, 173, 186, 199, 204, 212,243, 310, 316, 338, 341, 352, 362, 370, 373, 385, 389, 413: n = A,T,C or G
gcattaaagatcaagtaactggagagcctggctggcctcccacattattgccgtganngccaaaaaacaangttcaaaatcccacaanggggcttgggangtggtaaatggggcggtggaatcttcngaacttccctttgnaaaaaccaaactaacttctgnttttttttggnaaattctttggcnttcttttaaccgnccaantggccaantggccgaagaaaggccattgggggggaaaangggcacccacccttgttggaaatttcccaaaaaaaaagccttggggatggggttattttttgggtancccccntttttttcccaccttggggganttnttgggaaaaanaaaacctttnaagttttnaangggaaaaagaangggnttttggcttgggcaccctcctccntttgggggtttttttttttaaa

SEQ ID NO: 4879 - DNA, 446 bp, Homo sapiens
  misc_feature 376: n = A,T,C or G
gactggtagttcatcttacatgggacgaaagtgttccttacgtgatcacctgcagtaacctggaatgagggtgggacgtggcctccgcagcagctgcccaaagaagccaggtgataccacctaaaagtgcatggactgaactcgccatgaggcaaacattgaccaataggagagaaatgagacgggaggaaggtaatggagcaatccatctctctttccccctccagtggactattccaacatgtcttttctgtatgtacagcctgtctggtattgtcctgtctgagtggacatcatattcttcacagttcatgaggcggtggccagcttggtaacatgccagtttccatttgctttccatccttctttctcttgnttccctgttccgtgtctctctatcccagaatatcacctttcaataaaaccttaccacttaaaaaaaaaaa

SEQ ID NO: 4880 - DNA, 429 bp, Homo sapiens
  misc_feature 18, 30, 58, 69, 85, 93, 128, 134, 158: n = A,T,C or G
gaaggggccaaagggggngccccggggcgnaaacaaacttggcccccgttttgggttngtggggggggnccaagtggcctccccnactttgcnttttccaacaattgccaatttggcaattcccttcnaaagtngggcttggcaccgccacaagcaanggttgccaagcaaaccacttgccccaatgttgcccgcccaagggaaatggggaaagttcaaagggaagtggaaggccccggaccttgggcttcttcgcttggggaaggggggcaattccttggaagaactcctttccttcatgcttgggccgcccgatgggcttgcttggggggggacaagccgccccttggaagcttgcaaacaaaaggggtgggggaaaaacaaaagggggccttggggaagcttgccgttttgtttttttgcccattt

SEQ ID NO: 4881 - DNA, 284 bp, Homo sapiens
gcagatttttgagaagacgacacagcattgactcgtgacatggcaagatgtaacgagaggtctgggccggtcttggagctgtgcagataaaagtaatcaaatgacactcctggaatgcaaattggcattcttgactgcagcaattgcacaaccatgaaacatccctgacagcaagcaagattagaacaaaatgttatgtaaagcactgaactcaagaactctcacttgaaaattcaaactgtaacacttatattttaatatagcaatagtcagcaaaaaaaaaa

SEQ ID NO: 4882 - DNA, 297 bp, Homo sapiens
  misc_feature 22, 281: n = A,T,C or G
ggttccaaaatgcgtcacctgngtaacttcaatatcacctttgttcttcagcaaaatcgttccatacaaatgagtggcctcatgaacaggggcggcgtctctgaagaaagggccccagaaagacatccctctgcagcagcaccaccccttcctcgcctgcctccgctcctgaggatagactgctggtgggggcactcagaggaccacctcaccacaggcagggcttccacagacttaggtttctaaggaggatggcaaaccctaaggaagagaacgatgcnggacgaggcagcgcgg

SEQ ID NO: 4883 - DNA, 116 bp, Homo sapiens
  misc_feature 24, 32, 39, 68, 83, 89: n = A,T,C or G
ttttttgttttttttttatttttnttctaagngaccccngccactacctccttaagtcacaactcatnaaaaccaaagctatncaaccnccccaattcatcaaacaatctatcaaa

SEQ ID NO: 4884 - DNA, 174 bp, Homo sapiens
  misc_feature 37, 52, 53, 55, 57, 77, 82, 88, 89, 92, 94, 114, 127, 129,141: n = A,T,C or G
actcatcaaaccaccccacttacatttccttcataanattcctacacacctnnanancataaactcactttccatcnacttnctcaanntancntaaacccacaccatttcccnttctcccatcctntnccctaaattaanccatacccacctctttaatatacccactcctat

SEQ ID NO: 4885 - DNA, 508 bp, Homo sapiens
  misc_feature 317, 334, 393, 412, 422, 428, 430, 438, 448, 455, 459, 462,463, 464, 467, 469, 475, 479, 483: n = A,T,C or G
tggtctgcagggagggcgtggtcatcacagacagcagggactgtcaccgatggaggctccactgtctgaggatgtcaacgtctccacatgtacttctaaagtcaccgtgacagggaaggaggacagggggagctgagcgctgactcaaatgctctcacctggaagggacactcactgcctctattcatacttcattgtccagtgcaagtcttatggccacccttgacgtgaaggcccgcgggaagataccgttcttcttccgggcccagaataaaagaaagtgggatactgggtgggacccacttgtggtccttccntggtggcagaatccagnatttgaggttttcttacctgaccttccaaggccgatcaagtttcccattggattggatnttttttggaaaatggcccntggggattangaaatntntaattttntttaacaaanccccctnttgnatnnnaantnggggangggnaatnttttttttaactgggctaaacacct

SEQ ID NO: 4886 - DNA, 274 bp, Homo sapiens
tcaagtgtggatggagacttgaaagccccgtactgcttctctctgacctacaatcccatacatggaacaagatcttcctagccttggctcggacgaaccacagcaggaaaaagagaggcaaggcaacttccaggacagctcaaggccgtggtttcatgttttctgcaccacttctcaggagaaaccaaatgattctgaagttgctggagtactcaaccaggccactctgtgagtccccacctcagggactagtctacacacaataaatttttgt

SEQ ID NO: 4887 - DNA, 343 bp, Homo sapiens
  misc_feature 109, 136, 156, 163, 190, 218, 220, 259, 272, 279, 290, 303,320: n = A,T,C or G
ggaaaaaggcttccctttttcttcaaaggaattgccccattcttggtggaaaccaccatgggtaaggaagtcttcccaacccttggttccccaagattggttcccaacncttgggtcttggcggggcaacttggantgggggcttcaacaataatnccgaaantggaaattgccccagcttcttgctttngggccccgggatttaaaaaaacccaaancnaggggaacattcccagaatcattgaaaaagaatggggcnaaaatggcttgantcccccnacaagggaaanccacccttcaaangcccccatggaatggtngttcaaagctttgggaaagaaaa

SEQ ID NO: 4888 - DNA, 283 bp, Homo sapiens
aactgaaaggggcacatggcagatacaatcataaactttcatttcggagagcagtaaaaaaggagaagaagaacacactggtactccaacaagtcatagtttctgccagatgttgcaaaagtgagttagataactgacctttcttctggggcctgtgtcaactttgaatggagctttcaattgtacaataagcatctggacaagttttgacatctttataacactcttggagttcttaaaaagctaccattttgtttaaaaggatgaatttattgtggaggat

SEQ ID NO: 4889 - DNA, 311 bp, Homo sapiens
  misc_feature 159: n = A,T,C or G
ctctgttagaacaaggcaataaactgcgtaatgccatggtgatttctgcaatgaaatcaagcccagagaccagcatgttgttggaccaagttcatcctcctattaatgaagattctcttagagcatcaacacagatcagagccttttctaggaatcggnttaaagaccacattgaagatcacctcctcccttcaactgagaatacattttggagacatgacacaaaagctgataccagagctatacagctgctattaggcaggaaattgcgggggacccagaacagccaaaacaatcttgaaaaaaaaaaa

SEQ ID NO: 4890 - DNA, 579 bp, Homo sapiens
  misc_feature 472, 474, 526, 552: n = A,T,C or G
gtggggtctttcagtcctcctccgagagcccctgcagccgtgaaggaacactgtgggaaatgccggggagccacccagaaggttgaaagttaactgagctgaactttggatcctagattcagctaggactccgaggggaccacaccaccgcccacctgcatctggggatgttgcagctgttttctctggaagtcagcccccaaccctggaaacacactcgctctccccaccccagccagtcacctccagccttgacgtttcccaccccttccatgaagactcacaggctgcctgccagaggagtgcattgaccaccgccccccacctgccattttcccgagaaactcacatgctctgcctaaaaccctatcaaagttgggaggaaaagaacccacccgcttgggcctgagtcatgccacttcctcatttcagaaaccccaagccctggcgggggggggttccacaagggacngngccttcgcattgacacccttgacaggccgggcacttctgcgtgtcttggcangactttccgaactcctggcattctgnaatcctattaggatggtggctggataa

SEQ ID NO: 4891 - DNA, 234 bp, Homo sapiens
atgcagaagacacagaagaggactatgaggctgtaggagaagactgggtcactatatggaaggatcccacgtctctgaatgaccacatggaaagccgcctgctgaagaaacaaatgggctctatgtaattatctactctgtgaaattattgatattttggaatttgtatacagtagctggaattacttaccctaacaaataaaagtaccttttcaaatgtttaagaaaaaaaaa

SEQ ID NO: 4892 - DNA, 348 bp, Homo sapiens
gcctcctgtggagccggccgtggaaacgccctgacatggagtcaggagcccgagcccgtgtttcagacttggcgttcattgaccagaagagctgcttcaccacttaaccatgcagcttcaagggctccatctgcaaaacgcaggcttgaaccacaggactggttatgctccttcttgttctgtgtcctctaaatccaccccgtgggatggttctcatcctcatttctaggaaaacaaggcccaggtggaatctcttttctcatctgcaggactgatgcctttcttggcctaaatttcaacaacatgtgactataaaacttacctgtgtgtgaaccctaaaaaaaaaaa

SEQ ID NO: 4893 - DNA, 285 bp, Homo sapiens
  misc_feature 178, 244, 245: n = A,T,C or G
gtatgtttaacatctcccaggggaggcaagagcatggagactaaccatttaatggaaaatacaaacaaaaacctgcatctgttaaaagaagaagatctgagatacccagaccttaaggaagacagcacctgctgttctgcttgaggactgaactgcattgtgggaagccgcagcttgnaagaagacaggccgttattccctcctacaggcgctcctgtgatgccatatatagaaatgctgatanngaagttcatctggtttccagccttggacagctctatgatg

SEQ ID NO: 4894 - DNA, 284 bp, Homo sapiens
  misc_feature 200: n = A,T,C or G
atggaccaactggacatggactgatggatccaggggtcaacagctgacccaaccagggtatagcagaaagtcttcaaagatggccaccatcgattcctttgctccttctatgtatatgttacttctcatatcaaaaggtcctaaaggatgccacaaaagacccgtcatttaaacagggtgatgaaagaaagaagggattnagaaagatgggggtcttcttttcaagaagaagggcaagggaaatcttgcccgaagaaccacacttgggcccatgggggaggctt

SEQ ID NO: 4895 - DNA, 206 bp, Homo sapiens
gtgtcaagttgcggagctgggtattgtacatgtcctcgcatttggccctcctgaaaatccgagagaggagatgatgtgtccaaggtcactctgagaactgaacagagggccgccttctgggacccaagactccaggttccagcccactgcccagctgcctcaccctgtcatgagcacaataaaggagtttcgtgattaaaaaaaag

SEQ ID NO: 4896 - DNA, 122 bp, Homo sapiens
gtgcaggtgacaagctcttcaaatgtttgaaagtaactacgtctcccagtatctccaacgatctccttaaccaatcctcataaaaataaagttttgatcgccttaccattcaaaaaaaaaaa

SEQ ID NO: 4897 - DNA, 290 bp, Homo sapiens
cactgactcttgactagattccaagacgtgaaggacctgttaaaagaaaacaactactgctgaagatgaaaacccaagtcctcacaaattaaaggtgcctgggaatgccagaagaggatattggatcaccctggacatggagtaacaggcatgtcttctgtttatccaacacaattggtgccgacaaccaaaatccagtcctctacaagaacagcgaatgctctgaacatgagtcagcttgccaggtcccaatgtttctttttcaaatacacatattaaatccaaagctg

SEQ ID NO: 4898 - DNA, 351 bp, Homo sapiens
aaacttctcatggcacagaacctgccagcagaaagatgaagacacctgtccctatctgcatgtagagtcataagcagtgattttctaacttggcagtgctccttcgagttgacatttccaaaatcacctagaggaccaggaaattcagtcaggctggcagcacaagaggtgggcctgatcaaatccctcctggaaaattattattcaagaaataagagaaaatggaagacgctgggcacatgtcccaaaatactatagataagtttttggaagtaactactgatttccaaatatagaaagttttcgagctttgatttatttcgacctagaagaaaatttaaaaaataaaaa

SEQ ID NO: 4899 - DNA, 236 bp, Homo sapiens
  misc_feature 200, 212: n = A,T,C or G
ctcgtcgtgcatgtgggcatggacaccgccgccaaggcgatcattctggaacagtctggcaagaaccaaggctaccgggacgccgacatccgcagcttctggcccgagggcggcgtgtgcctacctggcagcccagacgtgctggagtcaggggtctgcatgaaggcagtctgcaagcgccgtaactgtggagggtgcancgtgatcttttncccgagatgcaggcaaaaaccctg

SEQ ID NO: 4900 - DNA, 555 bp, Homo sapiens
  misc_feature 17, 23, 41, 46, 62, 71, 99, 126, 137, 149, 166, 179, 181,182, 188, 218, 226, 330, 398, 413, 424, 448, 458, 472, 503,516, 534: n = A,T,C or G
cttagagagttacaagnaaaccntggagcgaatccaattgnggggnggagaaattttcaagnaggggtccnatggccccctccccttgggggaaacccnttctttttttttatttaatttgggggncctttttgggntgggggtggtancaaaaagggaaggttantttcctggaaaangnnattaantccttggccaaaaaaaaaggccaaaaaaangccgaaancccttggcttattctttggggttttcccaaaaaaccaatttaattttcttattccggaattttgggggaaaaaattttttggggaaggggggaaaatttaccanaattaaggttttgggggccaattggggcctttttaaaacttggggccaattggggccttggggggggnaagccaaagtttttnaatttcccctnggggaaggggggccccccccaatncttgggaatngggtttaattaatnggaaccttaatttaaaaaaccaaaaggggtnccaaccttggggnaaaattccaaaacccttncccttggggggcctttgggcc

SEQ ID NO: 4901 - DNA, 511 bp, Homo sapiens
  misc_feature 317, 369, 385, 401, 433, 455, 470, 485, 487, 489: n = A,T,C or G
ccctgcaccctatggagaggcagacatggcaatgaactgagcctcctgccaacacccagcaaggaactgaagcctcctgccaagagccatgtctcagtgttctcatcagtaaaaagggataacacgcctcacttcaaggatggttgtgaggagtgaagacagagcctggcacacgctgtccaaacaactagtggccaccagggcacccgcagtctcctcccttgtgtccctgaagctcatcaagagttgctcaacagcccgcagaaccacgtgcctgtctcattgtccttatcttccattttaaagggaggcatctncatttgcttgctggagggcttcagtggaggggatgtgattaaggcacaagantttgcttcttgaaagnactttcaaaatagaanctggtgccttgaaatggaggaaaacctggatntttggccttacagactactggnggccaaattcccaangaatacttaaaggangntntttattttattaagactgaggg

SEQ ID NO: 4902 - DNA, 303 bp, Homo sapiens
gaaggcagggatttcaacctgggcaacaagtccacagaacatgagatttctgaaggtgtgtgggatacatcatggttacataaaaatcctttcactatagttcctgcttccctatcttcaaaatgattccctgaagacttccgccatgacggtctaaagcctaacctctgaactgtggatggaaaattgaactccttgatgtgatctctgcacatcatgcaaccctaaacctaaatatattctctgtgtgggagccccattatttttagtctaatacattttaagtcatcttaaaaaaaaaaa

SEQ ID NO: 4903 - DNA, 402 bp, Homo sapiens
  misc_feature 85, 101, 103, 123, 141, 226, 302, 326, 343, 360, 361: n = A,T,C or G
tttaaaagttccagaaaacttggaagggggccaaggttcccccaagccaagggaaccccaatgggggaagttggttccctttcgntggccccaagccaatngntcttcccaaaggggaagggnaaaaacccccccaaaagnttttcttgccaagcccaagtgggccggggaagaaaggaaggggctttgcccttcccttgccaagcccccccccattaagccaagnaatttcttggaaggaaaccaaaatttaaactttcccacccaaaattggggccggttccggggcccttcggggaagnggggttggaaaaaattggggaaanttggttgggggccaaangggaaagcctttgaaanngggaaagggaaaagggggggggggcccccggttggcctttt

SEQ ID NO: 4904 - DNA, 502 bp, Homo sapiens
  misc_feature 21, 27, 29, 76, 120, 130, 152, 154, 160, 161, 167, 184, 186,362, 363, 391, 446: n = A,T,C or G
ggggtttggccccccggggcnggaaancngaaactttggccccccggcctttggggttggttggggggggcccccnaagttggccttccccccaacttgggctttttcccaaccaaattngccaattttnggcaatttccctttcaaaaagntnggggcnncgggcnacccggccaaccaaagncnaagggggtgggccaaggccaaaggccaaaccttggccccccccaattggtttggcccccggccccaagggggaaaattggggggaaaaaaggttttccaaaagggggaaaggtttggaaaagggggcccccccggaaacccctttgggggcctttcttttcggccttggggggaannggggggggcccaatttccctttgggaanaaaaaactttcccctttttcccctttcaaattggcctttggggcccggccccccnaaattgggggcctttgggcttttggggggggggaaacaaaaaggcgggcccccccc

SEQ ID NO: 4905 - DNA, 406 bp, Homo sapiens
gtggggtctttcagttggaatgaaagactcctggcggggccttggagaagaggagtcaccactgtgcgtagatggcaggagactcattacagatctcagtggagtagcagcggacttgaagagtggaggcctgagcgtgggaaccttcagttaccccagcctttgggaccctgggggccttggaacctggtctgtttcctgcgagtcctgcgttctgcttctgccccgactccaatctgaggggtctgtgggtatgggctgtgcagtgagcctggtgcgccccaccttgcaagttgtgcgtggggccagttagcctgcctgtgctttgacctgctttaaaaatgttctaattagttgtcaacactcaaaaattaaaaatcccgagatttaatcatcaaaaaaaaaa

SEQ ID NO: 4906 - DNA, 209 bp, Homo sapiens
  misc_feature 35, 39, 42, 44, 54, 63, 87, 95, 124, 126, 132, 134, 141,142, 162, 167, 168, 172: n = A,T,C or G
gcccttgaccttggtgtcttctttcctggaatganacanagntnttgtgcaccntagaaatgntctttgttggaaatcctgcttagnccgggatntaacatgggccgaaagacatggaagaacncncaatcntnttttacnnaatggggaagggggtttgangcttnncccnggtttttttgcggccgcccttggccaaaaaaccggtt

SEQ ID NO: 4907 - DNA, 351 bp, Homo sapiens
  misc_feature 48, 62, 73, 105, 109, 115, 139, 162, 173, 201, 292, 293,312, 318, 321, 330, 331: n = A,T,C or G
ctgggggggggaagccttaacccctggccattttaaaaagttccaagnaaaaccttggaagntggccttggtncccccccggggccaataaagggttccccaatncttncttggncgaaggaaaaagcccccatttttncaaggggagattaccccttgggnaggggccttcnaaaccggggctaagcaaaaggcctttcnacccaccaaaaaaaggccggaaaaattggggggccaccaccccaccaaggggggagggaaaaaaaccttggggtttggtccccttgggggnntggtttttgggaaaaaaanggattnggngtccggttnnggtccaatggggggggtggg

SEQ ID NO: 4908 - DNA, 397 bp, Homo sapiens
  misc_feature 18, 31, 38, 39, 46, 76, 100, 138, 164, 178, 180, 185, 199,229, 251, 283, 298, 303, 310, 374, 381: n = A,T,C or G
aaacctaggaggataccntccacaccttcancgaaaannggccaanagaccattggccacggattgcaagaaaacncccccatattaaatgggccttatntagggtgatcatacatctccagttattcttgcacattnccatatcattctaccatgcatggtgnatcccatggcccananggganatagacccccccanattgggaggtaaaaatagaaacttggttcnaaggaaaatcccaaggccaacnattcaacttggttgggcttccccttttggaanagaaaaatggccccngaaanccaaacnaatttttttcttttaacccttgcccacaacctgggatttacccttttccagggtttccattccncccaagnaagaaaccaccttggg

SEQ ID NO: 4909 - DNA, 353 bp, Homo sapiens
  misc_feature 143, 150, 167, 196, 204, 310: n = A,T,C or G
caaagttccccaagccaaggggaaccccaatggggagttgcccctttccgttgcccaagccattggttcttcccaaaggggaggggaaaaacccccccaaaaggttttcttgccaagccccaaggttggccggggaagaaagnaagggcnttgcccttccctttgcnaagcccccccaattaagccaagaatttcnttggaagnaaaccaaattaaaccttcccaccaaatttggggccggttcggggccccttcggggaagggggttggaaaaaatggggaagttggttggggggccaagggaaagccntggaaaaggggaaagggaaaaaggggggggggcccccggttgg

SEQ ID NO: 4910 - DNA, 300 bp, Homo sapiens
  misc_feature 71, 79, 87, 133, 138, 145, 158, 167, 180, 184, 187, 235,253, 259, 266, 275: n = A,T,C or G
ccctatacaaaggaaagaatgaaaactccaactcccaccaggccagtcttgcaagagctcctgaggaaccnctaatttnggaagggnaaactggtaccagccactgcaaaaacccccccaaaattttaagatnaatgnccctttnaagaaactgcgtnaactagtgngcaaaacaaccancttngcntcacatatacacggggcacaattttcatatatacacatattttccttntaatgtgaaatggggccnaaattnccccagnggaaaaaanacccaaactggccaaatttgggata

SEQ ID NO: 4911 - DNA, 209 bp, Homo sapiens
  misc_feature 16, 33, 41, 60, 65, 75, 83, 89, 103, 119, 130, 149, 151,169, 180, 181, 185: n = A,T,C or G
aaccccttgggggggnaagcttaccttggccantttaaagntccaagaaaacctggaagnaaaantgcccaattngggtccancctggnggagaaggactccngttttgtggaccttantggggccccanccaaggcaaaggccaacgngnaaaccttgggaagggtgngggcccccacnnatgncctttaagcccgacccattgggcc

SEQ ID NO: 4912 - DNA, 175 bp, Homo sapiens
  misc_feature 43, 48, 62, 90, 95, 112, 115, 116, 131, 145, 150, 151, 152: n = A,T,C or G
agcacccccttggggggggagactacccttggcattttaaagnttcangcaaacttgggagnggggaaaaaggccattggccttgttccnttggntggggttggaggccttngcnnggggggccttttttnggggccccaaactnctttnnnccttgggggcactttgaacgcgg

SEQ ID NO: 4913 - DNA, 101 bp, Homo sapiens
  misc_feature 18, 22, 54: n = A,T,C or G
tacttcctttattttttnggtncaagccttggcctttggtggtttttggaattntaaaaaaaactttttcaaaataaaaagggaattcccttgttgggaat

SEQ ID NO: 4914 - DNA, 337 bp, Homo sapiens
  misc_feature 35, 74, 84, 85, 86, 104, 113, 118, 128, 129, 140, 144, 153,160, 179, 180, 193, 196, 212, 246, 248, 252, 254, 264, 282,288, 309, 311, 320: n = A,T,C or G
actacacacgccatctcacctaggtatgggacccnagtaaaacgtgggacgaaactcctcgaattaattttggntgggagaaannnccggggcgcgtcaaaatntgtttatantttgnacctcgtggnnattcccgcaanaggnccgcatttncggctcngaaccaaccaattagcatnngcataaacctctntangagacacttaggagancaaagcgttttttgaaaatgggtattagggtcanancgtntngcaacgcctnttcacaaagtaaggattnaattgngggaaaaatttgtttgggttncncccccaatnggttacattgggaatat

SEQ ID NO: 4915 - DNA, 410 bp, Homo sapiens
gagggaaactgcagctggcaggtctggagaatcgctcaactacattcacagctttacttggagtcaagcaatggcaagaaaagtcttcatcttcactaggcactggacaacacggagaaatgctgactttgaggtgtttaaatttcatcctttgaggatcagttcaattaacttctcctaaaggaaaccaacccccacaaacaaaagatttacacccactgaaactgagaaacacttatcagaatctgtcatttcatagaatattgacttgtgacaggtcttacgacactgtctagttctatagcactgtgcttatttcttttccatccaacctttgtactccccactttgtatcttcttcagtggcttctaggaagtattactataactactgaatcaatgaattcacc

SEQ ID NO: 4916 - DNA, 660 bp, Homo sapiens
  misc_feature 27, 68, 84, 107, 175, 193, 200, 223, 263, 267, 283, 303,311, 363, 389, 425, 458, 469, 522, 545, 557, 598, 629: n = A,T,C or G
tcattcttttaccattggggggaccgnaaaaaggtggtttcccttttacttttgtattcaccctcgcnatgtttataccctcgngaaattggaagggggtggagggnacaggtgggccccccgcagctatgacctcgccccaaacagtaagccaagaggtagcattaccactctnaaataaggtggccattgnggacctnggaaacctccgcccattgtaagngccaaaaaccattttggacccaaattatggggaagcaagnaaanattggaagtaccgggngcaaggggaaaagaggttanaatagggnaaggccaaaattcccattcttctccttttttccccccctcccaaggtggggnacctaattttcccaaaccaattggtncttttttttcttggttaattggttaccaaggccctnggttctttggggttaattttggtacccttggtncttggaaggtnggggaccaattcaattaattttctttttcaaccaaggtttttcaattggaagnggccggggttggggcccccaagnctttttggggtnaaaaccaatttggccccaaggtttttcccaattttttggcnttttttccccaattccccttttccttttttncttccttttggtgttttccccccccttggtt

SEQ ID NO: 4917 - DNA, 244 bp, Homo sapiens
  misc_feature 28, 40, 42, 101, 113, 125, 147, 176, 204, 217, 222: n = A,T,C or G
ggggggggagctacctggcatgtaaagntcaacaactggnanggttattccctggctggataccccccccactttatggggaatggaatgggccccttttnccccactggganttaagaaatggnccctttttggtggtaatcaatnggaccctggaaacaaaccccaaggttttngaagcccggtggtggggtggcactttcntacggtgggaatntttcnttccttccttctggtccacccg

SEQ ID NO: 4918 - DNA, 442 bp, Homo sapiens
  misc_feature 193, 281, 407: n = A,T,C or G
ggcctgcagctgcatctgcttaaatgctgaacatttcaggaaactcccttctgaccatggcagcttaattcactggtagccacgtcaagatttgaggcacttttctcctgttgggcagtctccgcccttcctgcacctttttgcagctggccacgccccacagaactcagagcacacctatgccttgcactgntctgggacatcctcgagtgtcggtgggcagatcaatcgtcttaccgtggctgcttctcctcagccggagagagaccactgaggcgcanaggaatgagaggagtccagctatggcctaggcaagtcccctggcctcatggacctcaacccattggctaacagagaaaaagtgctgcctgcatacctcatgtgatacgactggaagagataatggncataaaaacatatagtctttttaaaaagtaaaaaa

SEQ ID NO: 4919 - DNA, 274 bp, Homo sapiens
cgacaaaggatctcctgtgagtcagaatttggtcaagaatttcagtgcatcttgatgctgattgagaataccacctgaaactgatctgaagtaataacaggctaccaacgtaatcatctctgtgttggtccatgcttgaatgaatgtacacggaatcttgggtaaacgagacaggatttggtttttcacttgtgtctaaaaataaataatagtgtattgttgcctctggcccaatgtacaaattttataaaatatactgcggcaaaaaaaaaaa

SEQ ID NO: 4920 - DNA, 164 bp, Homo sapiens
  misc_feature 17, 27, 31, 50, 52, 64, 75, 79, 87, 90, 139, 144: n = A,T,C or G
gactggtactgtcctcntcgcctcacngacnttctgcacgccctgactgnantggatgaacttntacaccccaanattngagccttnccngatgagccagcactgtatacctacacatgttaattccagctcgaagtangctcnggtgatgacaaggagattcc

SEQ ID NO: 4921 - DNA, 297 bp, Homo sapiens
gtactgaatacacaaggatgggcctccagtagccagctctgtttctctcatcaccccacctgaccagggccaggccaatcagattattttcctccaaaaatgtgaaatatggaagacaccaagactggaactcagtcctttgctagaacctgaagaacaagtctaacaacttctgctgctgaggtccctgggctccatcctcataccctttggcttggtagtgtagctcaacccttgtttctaagtgttatttcaatatccttctaataaatatttctttccccccaaaaaaaaaaa

SEQ ID NO: 4922 - DNA, 268 bp, Homo sapiens
  misc_feature 22, 29, 35, 46, 54, 55, 108, 157, 205, 217, 243: n = A,T,C or G
cttcaaactgtagtcattatantgaacangttatnacacctcctgngctctaanntctccatgcccacccagtatatatatacctggcacattaattcaaagggcaanttcgagggagcctctcttgttcttccctgcatcatctgatacctatgcncagacgataatgcatatattaggcttttatgaaatcccgtgctcccanccttgctctgancaagctggctatttgtatatgctgangctgagctttgatcacagcaacggc

SEQ ID NO: 4923 - DNA, 475 bp, Homo sapiens
gtatttgaggtccagaagatgatgggcaagatgaaaaacctgatcactgcagaaaaaaagaatcagaagtacagccaggaccagatgctgaagaagatcaatttgatgtggattcatagactctatgggataaatcaggcaacaaagccagtgggaattaagaagcaggcagaagcagagccaggaggtacacagctgatttagcatctttatagctatgagttttcttttaagctcattcccctctaagatacatctattggttttgaagttactgctccctgagaccaatctcaatggcgttcttgaacttgaaatcaaaaggatctgcatcctccttccagctctgacaagtattagctgcataaacctagacaaaatatttatattatttgaattataatgggcaacataatatctcactcagaaatattatgaagattaaataaaatattgagtgtcagctaaaaaaaaa

SEQ ID NO: 4924 - DNA, 316 bp, Homo sapiens
  misc_feature 37, 41, 49: n = A,T,C or G
cacaaaagacccgtcatttaaacagggtgatgaagangganggatttanaagatggggtctctctcaagagaggcaaggaatctggccgaagaccacactggcccatggggagcatcaggctccgaacccccgagtttggaggcaccaaaaaggaaagtggggaatgaatgaggcacaaaaaaactcatttttcccactttatactttttccttggctgggcctaaatacaaattgcaaaaagtctatcctaatgagagcttttaagacctttgcggatgcttattaaatggcaaataaatagagtaaaaaaaaaa

SEQ ID NO: 4925 - DNA, 176 bp, Homo sapiens
  misc_feature 17, 41, 42, 43, 44, 49, 52, 65, 104, 121, 147: n = A,T,C or G
gagagttgtgtcctganccactctaactgataagaagatannnntcccntgnaccccacttgaanaaggtacttgtgaaatgttcttcccactcttgagaatgnaattatgtacgccgctnccaaacctataaaaaactgcatgatngggccaccaccctttgccgactccctttt

SEQ ID NO: 4926 - DNA, 143 bp, Homo sapiens
  misc_feature 24, 56, 60, 63, 76, 79, 85, 92, 99, 115: n = A,T,C or G
gattctttacctgccccctctganttgtgatgatatacatgggccctctacccatngtanaanagccctttacacnaancttgcngctcttnccacagncatcaagcacccctancccaaacctataaaaactaaatggtcat

SEQ ID NO: 4927 - DNA, 332 bp, Homo sapiens
  misc_feature 36, 39, 41, 42, 66, 69, 78, 95, 109, 112, 133, 141, 142,145, 146, 148, 155, 156, 160, 181, 195, 204, 205, 212, 224,240, 247, 249, 252, 256, 278, 300, 312: n = A,T,C or G
caaacaagcccaaggcatgttaagcagtgataatanctnannatctactgaccacttaatattgtnccnagtactctnttttgatcaatgaacanccatacaccaaatnttnattgttacacaataggatctnacctaacnnttnnangactttnnttgnggaaacccaccaaaaccacanaattttttactgantactctcanntacaagnttattagccgtnaaacccctgcaagcancaaatananacncctnattgaattttgtcttataaatntatccactacacaaataacacnattgcccccctntcttatacactgtcgattcc

SEQ ID NO: 4928 - DNA, 348 bp, Homo sapiens
  misc_feature 36, 53, 55, 64, 66, 69, 74, 76, 109, 143, 179, 192, 201,203, 210, 246, 261, 271, 285, 305, 324, 326: n = A,T,C or G
tttattatttgaaatctaaagagtgtaatgcaaagnaatatgcaagcaccacnanggcacttgngnagnacacnanaaggagcatctgtaagtagagcttaggaatagnacttcccacaccatgttcccaaaacaagtctcanaaaggttaccattgtgccaagccaccaagtcagagngcaagctattgtntatgtaaangnaaaccanaccaaagcaaataagcttgtggggtccttgcccacnagtaaaagcaccggnaaagccctcnaccatttaaaactnggaagttccaagccttgggncattcttttggaatctttngnggaccttttcaaaaatccttcc

SEQ ID NO: 4929 - DNA, 315 bp, Homo sapiens
tctaactgaggcacaaagcactgcgcagaatctgcaccaatcgttgccaccgactggcagcagaatggtagaaggtgggagagtcccggaatccttccaggctgacttgagaaacgaggactgcacacgttcgtctcccgaaccgaaggggtgaaaaggctgggtgccagtttgctactcggctgcaatgatctcatgctcactgctctgtcgtcctgtccgaccagttcaaatgcctgttcattataaaccaaatacatacatacataaataacccaaactacttgaattcttcagtaaccaaaagaagaaaaa

SEQ ID NO: 4930 - DNA, 350 bp, Homo sapiens
  misc_feature 39, 44, 50, 52, 66, 145, 149, 156, 187, 195, 208, 212, 220,227, 233, 244, 262, 275, 278, 314, 324: n = A,T,C or G
tgggggagctaccttgcatttaaagtcaagaacttgganggggngggggntnagggtccccaaagnttgaccaggtttaggggatctttccatttccattccccaccaccattggacttgggttcaagggaaccagggggaaatngaanatttccnatcccttggaacccaccaatttggcaacttncttggggnaaaaggaataaanattnctctcttnccccgcncaaccncaatttggtanaaaaaaacctcaaatttngggggggcttgtncancggggcccacctatttgttggtaaaaaaaagcgccnctccttgaantggacacccaacaacagggaaggggg

SEQ ID NO: 4931 - DNA, 160 bp, Homo sapiens
  misc_feature 71, 72, 73, 85, 100, 112: n = A,T,C or G
gggggggaggccttacccttggccttttaaggttcaaggaaacttggaagggggtctggggggaaccaagnnncccactaattcnccccccggtttgggnaccggccaagcnaaaataacctttttcttctagggaatgaaaacaaatggcattggggcg

SEQ ID NO: 4932 - DNA, 210 bp, Homo sapiens
  misc_feature 20, 32, 37, 51, 53, 55, 59, 93, 97, 101, 113, 124, 142, 160,179, 186, 188: n = A,T,C or G
aaagtcaaggaacttggagngcctaaggaaangactnaccacaggcctggncntnctgngtttgcctttcattagggaatggactctgatgcngtgncccncctttcaccaanaagggggacanggcttggtagggtatacntttttccaactccatggnggtttggggacttacaaanaaccctngngggccaaaacccatcaacacac

SEQ ID NO: 4933 - DNA, 346 bp, Homo sapiens
  misc_feature 28, 34, 36, 39, 50, 53, 81, 86, 87, 92, 106, 119, 151, 175,195, 207, 235, 262, 302: n = A,T,C or G
aaggtgcactaaacttggagcactatcnagggcntnccnttttttgtaanggntcaccgcctaaaggagggtgcaacttcnctcgnnctttntcctaggatacaancactgccttgaanactcacctaactagatggcgtcggccatatantactatagaattggtgcatagttntagggaacatcgttcaaaanaaatgaaggccnatcatgtgtttccagggcaatgtggagngcctcacccaggaccgcccacgccctngcttgactccttggatctttgagactttcaagcctccagngtacaagaaaaatagagatttcttatttgttttaaaagccaaaa

SEQ ID NO: 4934 - DNA, 522 bp, Homo sapiens
  misc_feature 446: n = A,T,C or G
accaatccccggagatcaattgattacttcttctgctctctcactgggaaatgagcgggaattccaccaagcaactgtgcaacatcaggcccaagggaatgaaggaaacaacgaccagcggaaggggagaagcaactcactgtgtgtaaattacagactatgatgcatgcacgtgcatatgcgtcacacatacatgcacacaccagcacacgctgcattgacttgtctgcctgggccgtcaaaggccccctggggttaggaggacaagagggaaccatgggcagggtactcagtgaactgacccagccaagcaagaggggatttcagtgtccacagaccaaaccactcagaaaaccatggtcagattagcccaaggtttagaaccagaggaagaaaagttctgctgattagaaaacaccctgggaggaaatagcgacaaaacaganggttattattataattaacccacaacttccctggacagagcatagagtggggggaaggacctaaagaaagcagaaa

SEQ ID NO: 4935 - DNA, 213 bp, Homo sapiens
  misc_feature 33, 35, 45, 57, 60, 62, 83, 108, 170: n = A,T,C or G
tgcaagaaaacttggggcaccttaatggggaananaggcctattntttggaaggggnttncnagcccaagggaaggggccaanccccaactttacattttccttgggnaaaagaacaggcccccttggaaaacccaaaccaccttggatgggccacccttaagaatcttnaactttcttggccatcttgggaacttgtgggaaaaaaaaataa

SEQ ID NO: 4936 - DNA, 133 bp, Homo sapiens
  misc_feature 16, 44, 50, 59, 70, 71, 72, 81, 82, 88, 89: n = A,T,C or G
gtggtaagatagcagntctacaagctgagaaaccatccctagantcttcngttcaaccngggtaaacagnnnaaggacctnntttaannaaaccaaccaacaaattaattaaattaaagggcaaaaaaaaaaa

SEQ ID NO: 4937 - DNA, 118 bp, Homo sapiens
  misc_feature 28, 38, 45, 53, 57, 76, 80: n = A,T,C or G
acttcggcgctttgaaaggacggtgttnttgaaagaancatgctnttcccagntggngatgcctcgcctttaaagncttngattttcctggcactctttcctaattacctacattttt

SEQ ID NO: 4938 - DNA, 188 bp, Homo sapiens
atgaataagacttcagagaattatgaagttgaaaccacaacgtggaagacacctggggttgacaaacgagtcattggagacgcgcttcctaggagagctgtgtgaccaggaacacctagagtagtgtatttgctttgttaaagagtgacttgtatgagagagaaatctattttccataaaaataaaaa

SEQ ID NO: 4939 - DNA, 179 bp, Homo sapiens
gtctttcatctgaatcaagcaagaagatatacgcctttttacagaatactctgcacagagaaaatcccaacccttccttcaaataccatctttcaaaacatttctgagaatgtcatctcttttccttaggcaatgggagtgcactaaaatacactcttgatttgtccaaataaaaaaaa

SEQ ID NO: 4940 - DNA, 541 bp, Homo sapiens
  misc_feature 485, 511, 520: n = A,T,C or G
tctgaaggttatcttctctggccaagaagtggttgtgaactgattaccaagatggaaaatctactgcaaaccctcaagatataagcacccagggccgctggctttcacactttttcctcagaaagatcattctgaacacatgtggacactgccacagtttgccattacaaatgtaaaaaaatgtttagagagagctaagtatatggtgagtcctgagttgaaaattacagtgtggcaagctgttaattagagcttgagtctctccacaatgcctgctgctcagagggactcatttggggcagcacgctgagctttgcatcatggccagcactacaccacacctcggctccagcttttcttaatgcgtcctgctgatgatgcagcaaggagaagccacccagaaacaatgacagaatcacattataaaaactggaactcccttcaaaagcagcaccctgccctttgtaaagattctacttacaaantttacataatggatggtcaaaaagangcatatggnaagatgatgaacgcttcaact

SEQ ID NO: 4941 - DNA, 127 bp, Homo sapiens
  misc_feature 16, 20, 31, 52, 59, 60, 62, 76, 80, 86, 99: n = A,T,C or G
agccgctccggctatncccnctggtgagctncctcgctttaactcccaactntaggganncncctgcttgagccangggngggaancccctatttctcncattgacgcgcacaaaacttttctaatg

SEQ ID NO: 4942 - DNA, 193 bp, Homo sapiens
  misc_feature 44, 48, 54, 68, 82, 89, 105, 111, 112, 120, 123, 148, 150,157, 167: n = A,T,C or G
ctccaaacaataccctatagagaccttggaaggaagaattaganaacnacattnacagaaaagctatnggttcatgaatagnccctggnttgcctcatacctgcncatttnnagaagtgnaanacctgcacatttcaagctctgaagngnttgagtnacacctggtnaaacagaagagcagcaaaagggaaac

SEQ ID NO: 4943 - DNA, 749 bp, Homo sapiens
  misc_feature 22, 24, 28, 44, 69, 73, 82, 90, 97, 101, 119, 142, 146, 164,170, 176, 206, 210, 232, 236, 237, 263, 270, 534, 649, 660,722: n = A,T,C or G
ttgggggaccccggaccccacncngggnttcaaccttctggggncttataaggaaaatccacccccctntttntttgatttnaaaaggtnttggttnaaanaacaatttaaaaaaaaantttccccattttttccccatttnaaanggggcaaccaaagctttnttttanggggcnttctttggggttccaaaaaaacaaaggggncccntttcttctttttttggttcctngggnnagcccaccccaagaaaaaaccacccnggttaantttggggggaaacccccattcaaggggaaaattggggaaaagggcttcccttttggaagggcccttggggaagaaattggggaaattgtttgggggcccccaaagtccttgaaaaagggaaaccaagtggggggggcttgtaaatctttcacaaatcttgggaatcccaagcccaagaaaagaagccacttgaagaagctcaagttgtttgggaagggacaaaaaaaagggggccaaattgggatataccaagtaaaccttaanttgaaatcaaggggccccgggatccagggaaagatgccttggacattttgtttatcaagcaggaagaaaacaagaaagtaaaagggagggggggaaaccttcttcctaaagtggntacttgggggntaatgaaaaagtggtcctttcaaggggaagaagggcggacattggaaaccaaggggcaagcnttggataaaccggtttggattaccttg

SEQ ID NO: 4944 - DNA, 177 bp, Homo sapiens
  misc_feature 30, 31, 39, 40, 43, 55, 89, 97, 122, 125, 127, 142, 158, 161: n = A,T,C or G
aaggtgttaactataaagaatgctcatgtnntgacccanntanctgtcaagccangaggctcattgggcaccctgttctcagctgtcanacccattnctaattacatccgtaatccataganagncntaacaagtattaggnttcaatcttacctctnagnacccattggccttgga

SEQ ID NO: 4945 - DNA, 218 bp, Homo sapiens
  misc_feature 167: n = A,T,C or G
agatcaggatcctaagggagttaacagaagacatggagagtttttaaaatgtcaatgcctaggggatctttactgacggcaagaaagaagaaagaaacattgaaatcctagagcctggtcttggtttagtgacccccctggccttaccctttgtcccttggccatcncactgctcaatttgaccagttcaaacaacagaggaatgaaaaagaaataaa

SEQ ID NO: 4946 - DNA, 576 bp, Homo sapiens
  misc_feature 44, 73, 93, 98, 110, 123, 126, 137, 147, 161, 176, 182, 189,222, 230, 234, 235, 255, 258, 262, 263, 264, 268, 270, 281,284, 288, 290, 291, 293, 297, 305, 311, 322, 331, 334, 343,368, 370, 386, 405, 411, 414, 415, 433, 438, 441: n = A,T,C or G
  misc_feature 460, 466, 469, 478, 492, 518, 537: n = A,T,C or G
ggtaaataacaaccatggcgggtaaacccctttgttcaccgctncttatttacccacacccttttcttcgggnacccgggacttccattgtgnggtcnatcttcaatttnaatccctcaattnacnaaccctttatnaagggccgangttccttacttacngggtccacccaattnttggcnagaatgnaaagccccttggaagggcaaaaagaaccggggnccttgacnatannggctttggaaatcttcccangcntccnnntaantntaatcaagccnttntgcnannancatnaaccaaanggctanaaatgttgttncaaccagtnggnctttctttngtggtaaaccccaagggaaaacctngngggaagctttgccccncaattttttgcacccaatnggcccntannaccaaatttttattgggnacccnttnttaccgggaaacaacccgngtatcnggnttattggtngccttattaaaaanactttttgcgccattttcaaaccaancccacaaaactttttttgnccattttcaaaaaaaccaccccttttttttaaaaaaaca

SEQ ID NO: 4947 - DNA, 127 bp, Homo sapiens
  misc_feature 16, 30, 45, 69: n = A,T,C or G
cccccattctcgttgngcttcttaacagtnttttttattgccctncccccgacttcaaaaagtgttaanagttcccatggggatggtgaaatgggccattcctgaatggtataataaatctcaccgg

SEQ ID NO: 4948 - DNA, 136 bp, Homo sapiens
  misc_feature 46, 64, 68, 94: n = A,T,C or G
ttcactgcaacctctgccgcctttgggacaaagccattcttcttgnctcagcactcccgaatangacnaaagattccccactttgtggcccaanactggggtgcaaatggcgcaatctttggctcacttgtcacct

SEQ ID NO: 4949 - DNA, 176 bp, Homo sapiens
gatctgctaccctaaaatctaagaagcatcagaagaaggactttgtctgctttgtttgctgccctatccccagtaactagaagagtgcctggtatatagcagaccttcaatatgtatatcaaatgagtaagtgggtgtcctgagcaataaaaattgagtaattatgaaaaaaaaaa

SEQ ID NO: 4950 - DNA, 230 bp, Homo sapiens
  misc_feature 138, 176: n = A,T,C or G
aagccatgagctaagctgatgccattcagctgggtagcatcgcagtcactgtgcaacttttaaacctacagctgcccaggcccactgcagacctgctaaattcgagctccttgtagtggggccaggccctgggacttncacaaaactctgcaaggtatcactgatgagaaaaccanactcgatgagagtctccttgagctcgggggaagaacttgcataaccggccactt

SEQ ID NO: 4951 - DNA, 167 bp, Homo sapiens
gcttccagatctagtgtccaagtctatgagtagctttattaacagagagaatggccaagagaagcaagcacactacagcaataaaaagtgacagttgacggcctagcagcaaaggaggaaacagaaaaactataaataggagtacaataattccaaagaagaaaaaa

SEQ ID NO: 4952 - DNA, 586 bp, Homo sapiens
  misc_feature 59, 121, 129, 475, 477: n = A,T,C or G
gactcctgcttaagtccaactgagccgctgagacaagtgatgtcacctgccaatactgnagattgaataaccagggaaggctgaggaatgcaagtgaatgtaaaaaccacctggagggaancattgcancaagaaaggaacagcaagtgcagaggcctgaggcagaaccagcagggaaaatgctttgaggtgaggcaggttccatgaaaacctggaagaaatattcctgaggaccatccaacaccatttccctgagagacaagctgtaagtgctgttctagttacagatccgagtccctggtacattgatatcaagtaagggtgcatgcagctcaaaaggcagtttccattacactggacaagagtgtggctgcctgagtcctaaaactgcagtggcttctgctgacaatgtgaggagtagctgccctgtccagagtgtggcccgcacgctgccccttccctggagggactgaananaacagcttggagcatgccctttcctttccttatctcgcccactatgctaatgctgctcatccctcaagatcccgaggtattcctcctcaattcaatacaaccaatcaac

SEQ ID NO: 4953 - DNA, 218 bp, Homo sapiens
acaacacaccatgtgccaagaacagaagaatcccacacagccactgcccaagtgaagctcacagtcaggagagcagacaggagaagtggcggttctctcagcaccctgattaaaccttcagagccatggtggataacatccagctgggtcctgacaggtgtcaggttgctgccagtcctttgtagaaaataaactcttcaaatttgtaaaaaaaaaaa

SEQ ID NO: 4954 - DNA, 364 bp, Homo sapiens
gtttctttttgccctgtgggcagcagttggaagatcctgagctctcggctgtgttctcattccacctcgaagaggatgcaggacccagggcagcttgcggcaaagctgcagggtggcacggtgttgggccatccttccggatgcccaatcttaggattgcagtcactgtggcatagctgggagccatggatgggtgataattccatggataattccaggatgatggactagcagacatctcatgataggaaagataagaccactgggatacataagtcatatgttttacaggtttattgagaagtttatctgcctgacaagatgggttgatttgtgcatcttaggtcaggataggatgcgtttt

SEQ ID NO: 4955 - DNA, 373 bp, Homo sapiens
caaagccaagaacccttatgggccaaactgcactttggggcccgcctgttccgcatcaaaaagaaatattgaaaattataccaggcaacaggtataaaccaggacttctcctgaaacctgattcaccccctgaaaatggaaaagcatctcaccctgaaataaaaggatcctcacctaccacctgagcaaatggggctctacaattacgaagtactgtggatgggtggacatgtctgctatgccacgaaaggcagctagacagaaactgacaatcattttctatacttgatcttctgatagacaattgtcctcgttttttctcaaaatttagcttcctcaatttcggcttaattcctactctccttaaaataaa

SEQ ID NO: 4956 - DNA, 155 bp, Homo sapiens
tgaccttgggaatgaaagctagggataatggagcaaaaacattgaagcctggattcctgaaggtaccggacagctgccatgccacccctggacggcctgcttcccaaatttcttttatttaagacagaaataaactttaatcttatcaaaaaaaa

SEQ ID NO: 4957 - DNA, 181 bp, Homo sapiens
gtggggtctttcactggagcgcggctgtctacgtggaaatggccatgaaggcaaaggacacatggaactgtggagagccagcgtgatggaaagactgaaacatctcactagtaatttgacactgatcccatgttgaaatcatcacgtgaaatacaatgttattgcaatgagaaaaaaaaaa

SEQ ID NO: 4958 - DNA, 525 bp, Homo sapiens
  misc_feature 23, 32, 39, 45, 46, 59, 75, 77, 85, 88, 92, 101, 146, 150,153, 193, 200, 225, 226, 232, 234, 244, 246, 252, 259, 260,265, 267, 323, 364, 366, 367, 374, 393, 414, 424, 440, 445,454, 463, 476, 492, 500: n = A,T,C or G
ggggtcaaattaaccccgccttntggtttttntatcctncccctnnataaaacccgggnggattgtttttcccananaattgttnggnaaangaaggcctnccttggattcccaatttttttactcaggaaaattggaaggaactntttnaangcccttttttaaaaaattttccttaaaacaaatttggggnccaaaanttggaccaagttttggccttgggannccattncncaaaagagtntnattttnttttggnngggangntttttattgggggccttggaaaatttggggggtcccccttcccaaaaaaaattttngttaattggtttggaaaaccttctttaagcccccaccaagntnncccctcnaaaaattggtggaaccttngccattttttggggaggggtnaaggggtccnttttttggaggggganggggntaaatttcnaaaaaaggnttaaaaaattggngggggcccccttttangaaggaanggggggcccccttattccccaaaaa

SEQ ID NO: 4959 - DNA, 370 bp, Homo sapiens
gtgagagttgggttttccagagcccagtcacaagaaatttacctattgatcctctgacgaaatgcaatggtaagctgtgctaagtaaactgacccagctcaccctaacttgtaactgcactgcaatgcttgaaacgcagcgaaaatcctacagcatgttcccttgttctctgaactcacctgcccattgcgtgcaagaaaaagctggattccttctcggtctagtaaatgattttcttgaatgatgcaaccggcttatctagtgggttatctctggacctgttcacaagctgacaagtatttgcagggatgtacagtcatgctttctgttcctcaaactgtaatgtgtttgtaagtgaaaaatgatgagt

SEQ ID NO: 4960 - DNA, 296 bp, Homo sapiens
aattgaaaattaagaatgccatgtaaagcaaggtgaaaaaggcaggggtgtacacatcaatcccagatccagggagccaacatctttaagtagacttcttcagatggcctgtggggtaccacagagcttacagaacaacttaagatcactccaaaccagagtcaaagacatccctgccacgcagcacatagatttataactctggtcaaaggtttcgacaaatacagatttcttcaatccgaagtccatctgtgtgtgttcccagaaataaagaacagtgcatgtctaaaaaaaaa

SEQ ID NO: 4961 - DNA, 376 bp, Homo sapiens
agcacctaccacagtacctggcacacagctgtttgatcaaagcttgctacactgaactaaactgcagtccagatcctttggataatttatgcaagatcacaaagctaagaggtggcagagttgggaaaggagaaaaggcaaaccaattcgtggactgagcctagaacagcactgcttccctcatgagtaggatggcaccgcctaaaggcatccaacatcaatcaccacctccacagaaatgcatgctccttttatggaaacgcagcattcagagttttacaacatttgtaccatggaaggaaagaccagtgctgatttggtgccaaactcaaccgtaaatacaaggtgttttcttcattggtaattacagatgaag

SEQ ID NO: 4962 - DNA, 179 bp, Homo sapiens
  misc_feature 25, 27, 32, 34, 49, 52, 60, 61, 65, 79, 103, 106, 117, 128,134: n = A,T,C or G
tttttttcgggaggccagagctttncnagacncntgggatcttaaaagntcntccatagnncctnggatattttggggnccacaatttgctttttctggagtnttntctatcacccnccttggggganaggtanaaaatgaaccttctaattaaaagagcgcaacacccttccttgggt

SEQ ID NO: 4963 - DNA, 287 bp, Homo sapiens
atacccacatacctccaccccagtacctggcagagtgcactcagtgaactttcttgaggattgttaactaacttcaaggttgaccatttttacttaatctgagagtaactgacattttctgtggtatcctttttcatatttgagcacaagtgatttaggacttggaacggagagctagtaggtggggctagaatcggcacctgcggaaaatccgaccaatgaggagcgaacgacacagcggccatcttggtaaaggaaaaggaacaagggagaaagggggacccaat

SEQ ID NO: 4964 - DNA, 290 bp, Homo sapiens
  misc_feature 262: n = A,T,C or G
atgaatcaccaatgaccgggttaaatgttgttcctggtgccatttcttgaagagttgacacggctgcctacgagggagaagaggccacacacccagcaagcaacagaaagaggtgatgctgtcacttacaagggccgctatcaaacacgagtaccaaagttctagcctagcactgcaaggagacccatgtcctaatagacgcaatgccttgccaaaaaatatcagttctgtatacttcagggtaaaactatgtttctgaggntacagaaaaatagccttttggaatctta

SEQ ID NO: 4965 - DNA, 379 bp, Homo sapiens
  misc_feature 255, 256, 261, 277, 325: n = A,T,C or G
caattgaatgtaatggtgtcattcattctattaagaagcctgggggaagggcagattgagagataacaagagtcctatttctacatattaaatgactaagagaaaccacctatggaatgacaataaataaacagacaactcttggctccgcccagaagcaatccatcattttgaggtcaagtagaaaaggtggaacctgaaaggaaacggagaagtggtggtgagggaagtaggagaaaaaacccccaagggggnnaaggnaaggttaatttaaggnccgggttcccaacccaaaaagggaaaaagggccccaaagggggaaggnaaattgggaaaaaaaagggccctttttttttttttccccccccaaaggggaaaa

SEQ ID NO: 4966 - DNA, 251 bp, Homo sapiens
caagtccagaatgaaagtgggttgttcccatggcaacagaatacaaggcagagaactccagagaaggggggcgggtgcatctctacactcaaggccatagctgcaagaaagccccaggctccaggatggtggcagcaaagagatgcaacctgccatgacatcacactgccagatggcctgctgttgacatagggttcccccccaactaattatttgcataaatctggatcattcattcaaagaaaaataaa

SEQ ID NO: 4967 - DNA, 294 bp, Homo sapiens
aatggagtatctgctgaggagactggaatgaggaaggaactcattaagtctgattgtctctgaacagcaaagttcctgagatagccaacttaacatacctggtgtcaggagtgattcaaggatgcagctggaaaaatgtggatttgggactagatctctcactacctgactgttaatgatgatctaatcttgtaagtgtatggctgtcttgagaaatacatgaatcatggatctctgttggatgggtattcagatgatcctccaaatcttccttttaccaaataagaaaaatgg

SEQ ID NO: 4968 - DNA, 114 bp, Homo sapiens
  misc_feature 26, 48, 64, 68, 70, 71, 95: n = A,T,C or G
cttcggttgaacccgaaggattacanctgtgcactttcactggccccnagcgatgatttgtttnttanannccaggagtctgatgaccatcctgngcaatgatgagaaaccgtg

SEQ ID NO: 4969 - DNA, 182 bp, Homo sapiens
  misc_feature 45, 60, 64, 68, 69, 74, 120, 128, 153: n = A,T,C or G
tcagcctggttaagtccaagctgaattggactcgcttccctttanaaaggcgcgcctctnaggnaatnntggantcctgagcgccatttaaaatggccgcttttggccaaattcttttgnttttttancctgggcacagaaaataccttaatnaatccacctctggttattttaacccccca

SEQ ID NO: 4970 - DNA, 166 bp, Homo sapiens
  misc_feature 150: n = A,T,C or G
gttccagagcagaagaggcagaggatttaacaatgctcctagaagaggaccaggagaacttcgtggatgtggaaagggcctacaagggagccaagaagcacccatgagcatcttttttccataagccctttgggtattaaagaggattgnaacccaaaaaaaaaaa

SEQ ID NO: 4971 - DNA, 279 bp, Homo sapiens
  misc_feature 30, 52, 65, 76, 110, 113, 117, 136, 162, 164, 193, 212, 222,248: n = A,T,C or G
ttaataactgaggaaccacccatggcccantccatgccctcatcttgcgccngtgaaaactgcangctcatccagntaaaggcaggatgaagcatgatggacatcaggancancaantcgccttacttcagagggnacaagctcgacaggtcgtaaaatttnanggcaagcaatcccaggaaggacacgctgngaactttggagcgtgcaangaattcaccnttcctttctcttgtctagcttttcangcctcctctatccctctgtaggaagcgcacg

SEQ ID NO: 4972 - DNA, 314 bp, Homo sapiens
  misc_feature 228, 255, 278, 295: n = A,T,C or G
gcccacccaggaccatttgtactccaagaataaaaacattgaaccagattcccttggagtccactttcaggacccagaacagcccctagtggtgtggctcctgtctgtcaaggtgatgtccagaaacctcagctgctttcgctgtgatgtacaaatccccttagggccctgagtctctggccaaaatcatcgttacatattcttgccaaaccacagtaccattactgngaattgatgaatcttagaatctctggntagaaaagaatattggaggccgnttctcccaataaaaggnatgctcctaaaaaaaaaaa

SEQ ID NO: 4973 - DNA, 449 bp, Homo sapiens
gggcaggaagcagaacactcacattcactgataaaacaaattaagcttggacaagagaagctgcagacagaaaactccttcaggactcagatggtggtggagaaagattggaagcagctgcctcggccaaccacctggaaagtcagccagttgtgctcctatctgcaagatgtgcaaaatgctgccaggcagccgtgtggtcaagtcagtgggaaattggaaaattacaagcatagtgcacatgaaatatgtacagaaaacagaagttggataggcccgcctcagagcaatggagagtacctcggatgctcttgctacaattatcttgtacaaatgcaaagagtgaaatgagagctgtgtatattgcctgcactagcagaagaagaacttcaaaaaggtaaatgaggctagttttatatcaatgcaatgagatgcttcaaaaaaaaaaa

SEQ ID NO: 4974 - DNA, 317 bp, Homo sapiens
  misc_feature 17, 154: n = A,T,C or G
ggggtgaatcatgatgnctaagactgaaaaagaatcttctgattcctgcttctcagcttcccctgcagctatgagtggctatgtgacccagtcctcatcaacgaaatgttcgggaaagtcttgcttgctcctgggagaggtcctcctcaccagntaaagtagacacgggcaggagcacccgtcttccttacatgctttgggtgtagccgtggagaattagatgccttgaaggttgcagcagccctgaggacaagcaaagaaacccaaaaaactgcagagagacacagcagaagcctggcattgttgactcacttacc

SEQ ID NO: 4975 - DNA, 337 bp, Homo sapiens
  misc_feature 22, 35, 42, 47, 52, 54, 59, 65, 71, 72, 73, 75, 77, 81, 85,90, 130, 132, 142, 157, 186, 219, 223, 244, 262, 279, 311,315: n = A,T,C or G
gaacatattgttaccatgcaanctcaaactcctanggctcangggangactncngcctnaacctnctgaannncngngacnacangggcnagccaccacgtctggctaatcctttcacttttttgtggananaagctattanttataattacccaangcggagtctcaacttcgaaactcctggcnctcaaagtgatcctcctgcctttggcctccccnaaantgctagggatttacagggcgntaaaggccacctggtggnccccgcccttatccaanggaaaaacttttcccaagctggtaattttctncttntgggaatttccctcttcccttt

SEQ ID NO: 4976 - DNA, 327 bp, Homo sapiens
  misc_feature 24, 53, 57, 128, 136, 163, 171, 181, 199, 203, 205, 209,219, 227, 243, 274, 281, 296, 310: n = A,T,C or G
tggggggggaagccttaaaccctngccattttaaaagggttccaggaaaaacntggnaggggaaaatgggaaggaaatgggccccttggaggttagggccccccaaggggagggggaatggccttggncccaaaangggggggccaccaaagccaaagaaagntttccggncccttttggnaaaggcccccaccaaagnaacntngggnaccctttggnaaattttncccaaacccccaatcnttggcccttggaatccaaagtccatttcggnaatggcntccccaattggcccntaaagttttttttncaatttaaaaaaagtgg

SEQ ID NO: 4977 - DNA, 154 bp, Homo sapiens
  misc_feature 72, 74, 75, 79, 86, 92, 95, 97, 120, 125: n = A,T,C or G
ccctggcctttaaggtcaagaaaactggaggaaaacttggtttggccccattggggactttcttgtaattgnanngganaagggancaaccntangnacttacctaaggaggaacccccntttanagggatggggtaccttgttttttacaaca

SEQ ID NO: 4978 - DNA, 166 bp, Homo sapiens
  misc_feature 39, 73, 77, 87, 100, 102, 108, 148: n = A,T,C or G
ggaggaaaccggagatcacgaggctgcctgccggcactngtttccttggtcttgcctcagatccaaaagccancccnggaaggaacncctctcattttcnanaagaangggattccaccccccattccaagtcccctccaaaaatatntattgaaagaaaacaaaa

SEQ ID NO: 4979 - DNA, 183 bp, Homo sapiens
gcgcagtggccagagctccagcaaccatcttggacaatgaaaaaaccttcacaatgatagccatggcgaaacacagtggagtaggaagataaaagagactgagaaccggataaccacggagttccataccagctctcctgatacctttcataaaagagtgaaatgagcatctaaaaaaaaaaa

SEQ ID NO: 4980 - DNA, 112 bp, Homo sapiens
  misc_feature 28, 43, 49, 52, 60, 64, 66, 69, 74, 87: n = A,T,C or G
ctcatatggtattttttgggtttaaaancgggtttaaaccctncctatnatntaaatcancaantntanatatnaatttatgctttnttcacttcaaacattacaactaaaa

SEQ ID NO: 4981 - DNA, 624 bp, Homo sapiens
  misc_feature 91, 132, 252, 276, 283, 286, 299, 312, 320, 330, 347, 354,358, 374, 384, 405, 420, 429, 434, 436, 463, 476, 495, 500,512, 517, 524, 535, 541, 590, 608: n = A,T,C or G
gccttacccccttggccaattttaaaagggttccaaggaaaaaccttgggaggggggaacccctttttccctttccccgggggcccaaggncgggaaccttgggctttggcttaaccccccttgggccccgnagggaaaaaggtttttggcctttggccccccggtgggggccaattttgggctttaactttttccccaatgggaaaaagggggaaaaaaaatccttaaatccctttccttccttttttttncaaattgggtcctttttttgggtnttccttnggnaaaaaaatttttncggcctttggggnggggggtnaatttttttnccttgggagggtaattnaaaaggntttngggggttttttggggncctttgggtngggtttttggccccttggggnccggccctttggggnccccgggtngggtncnttttcctttccaacccctttgggaagnaaattaaagggcnttaaaaaggttttttttcnaaggnttttcccccccnaaggnccccccntttttcccccngggggnccccaatttctttggggtccccctttcccccccgggggggggggccaanccccctttcctttgggcnaacccccccttttggg

SEQ ID NO: 4982 - DNA, 277 bp, Homo sapiens
aaacttgatgccatggacttctgaatgaagaaagaacacatagactactagagacccatcaagatggtactgtttacacatgcaccatggcacacaagaagcacccaagtggaaccatcttccacataccagtttctgatgaataacttaccgacccaacactgcatggaatagaactgtcaagggaagcccaaaaaaaccacaaacaggaaaaattgttaaacaattatgtgaagtcacccaaagattttgttgttgttgttgttaaaaaaaaaaa

SEQ ID NO: 4983 - DNA, 310 bp, Homo sapiens
  misc_feature 266: n = A,T,C or G
agatctccctttactttcagtgacggaaaaggaaattgtggcctctgggagtctggacttgactatacttcgctacccttgttcagcatgccggttaaggaagacctcttccaccagccagtactctgtcctttgtaaccccatttacagtaccagaaggatcttctatgtgagctttgggtataagaagacatacctaccagcttcctaggatgagtcttgaaaatcacctgcttagttttcttaaaatgagaatctatagttgnatttgctaggatctggcctaaagaatttctagaaggtgacacat

SEQ ID NO: 4984 - DNA, 204 bp, Homo sapiens
  misc_feature 25, 49, 57, 58, 77, 81, 88, 92, 100, 103, 109, 128, 129,135, 136, 141, 169, 174, 177, 178: n = A,T,C or G
ttttccctctcctcacacggcattngggaagtctgctttaagcactgcntcctttgnnaagagggtacttccacaantatnttgcctngacncaaggagngantgattnatttcccaccacataattnnaaaganntcgtngaaagtcaagcgcaggttgcttccttgnggccncannacactttttgtagaaggaagtggggg

SEQ ID NO: 4985 - DNA, 500 bp, Homo sapiens
  misc_feature 48, 50, 81, 91, 218, 289, 291, 299, 303, 312, 321, 322, 328,332, 335, 353, 398, 455: n = A,T,C or G
ggccaaaccaaccttaaaattcaaggccccctaaaaggaataaccccncngggttgggaaaagaaaaggggccagggaagnaaaagccaanttggaaggggaagggggggaaaaggggaaggggaagaaaacccaccaaggaatttttttcttcccccttcttcccttcaaggttggggaatttttggggggaaaaggttttggtttttttaaaaagnaacctgggccaattccccttttggggccaaaaggaaggggggtaccttccccgcccaagccttatttgttngncctttggnaccncccaagganaaggggganngggggnattncantttccccccccccccaanttttttaaaaaaaaggtccttgggtgggaaggttccaaggccccnaggttttccttttcccttggggggccttccaaagaaccccttttttggttggaaagnaaggttggggggggaaatttttgggaaggttttgggaccttaacc

SEQ ID NO: 4986 - DNA, 101 bp, Homo sapiens
  misc_feature 21, 22, 39, 47, 52, 56: n = A,T,C or G
aaaccctttgggaggggggcnnttggccccccaaggggnaaaaaagnccaanttgnaaaccttggggggggggggagggggcctttttccaaaaaaaaaaa

SEQ ID NO: 4987 - DNA, 118 bp, Homo sapiens
  misc_feature 25, 43, 64, 81, 92: n = A,T,C or G
attggtgggcactggcctccaatgntaaacctttcgtctggtnggcttatccattccactatanaggaaggaaggcaagangaagaaaacanggaggcaaggaaggaaggaaagtaaa

SEQ ID NO: 4988 - DNA, 288 bp, Homo sapiens
  misc_feature 269: n = A,T,C or G
gaaagggcagctgacaggcctgagatgtgggagaacgagtcctgggccctcacagacattgactcaattcatctctggactcctggaccattgcagtagctccttaatcttcccaattctggcccaggttgctacggcgtcttctctacacagtagccgcattgagcttgctacaacctcggtcaggccatgacaagcctctgctctatgcagagccctccagagactcacttttcccagaataaaagcccagctctctacagtgaggncttaagttaaaaaaaaaaa

SEQ ID NO: 4989 - DNA, 394 bp, Homo sapiens
ccacccccttggtctccccactgctgtctctggcactggttcacaacaaagcgcattactaagccaaagcctgctgagtcgacttttcaactgtgctgaggatcatgtgacattcatcctcccaaataacaattcgctgtgggtaatatgttcctagttaccctgcagcttccagacctaggcctcagaagagtttcataaactactaacaatacaggttgtcttgtctcactgggaaagacttcgtaatatttgttcctcatagaaatttaattatttcgatggtcattttcttttatgccttttgaacaattaccgagggtattaaaaagactcacttttccttctttgttcatcttaacaagctaaaataaaataagccgcatatgaaatg

SEQ ID NO: 4990 - DNA, 447 bp, Homo sapiens
  misc_feature 410, 425, 430: n = A,T,C or G
agagggagaaagagcaaccagtgtcagagtgatgcaatgtgacgaagactcaccagccatttgctggcttggaagacgggaaggggccacgagccaaggcatgcaggccaggaaggattctccccggagcccccagagggaacacagccctgctgatgccttgactttaactcactgagagtgcatcagacttccgatctccagaacgatcccagagaaaagagagtcatccctggggatgggaaggcaggatccgcagtggacctgccgtgctttctggaccctgaataagtgggggcctgttttcccatgggccacactcctctggggcagactcctggcatctccacagatcaggacactctcacgtctttgcataagccccaacttgtcactgtataataaagaanctgactggggttttngcctnggttctggaaaaaaaaa

SEQ ID NO: 4991 - DNA, 283 bp, Homo sapiens
  misc_feature 129, 161: n = A,T,C or G
gtggggtctttcaagacccccagacaccccgagagacgccgaagacccagacagagccacgcagccacgcacactccacagacgcacggacatccactcagagcccgagacacagcgccgcgaacactncagacacacgcccggagccccagacacctcgnagaccagacagtgtctcacacgcccctccacccccgcccaaagttgataaagagccggcctaaatgctccatcgcgactgccctcagggaaataaaatggaaacttcacggaaaaaaaaaaa

SEQ ID NO: 4992 - DNA, 168 bp, Homo sapiens
gagccgggctgggccccaccagggcgagacatctgctttcaatcagctgcccttctgcccgagaagggggtgagggctgagacctcccccaagcccaacttctcatcacacagaatggacactgagggcaaaggaggcaggagaagctctagagacccaggtcaattt

SEQ ID NO: 4993 - DNA, 151 bp, Homo sapiens
  misc_feature 33, 53, 64, 65, 67, 72, 73, 77, 88, 100, 107, 110, 117, 120: n = A,T,C or G
tagatctgccatggaatgctgcctgatcagatntagaagaggcaaaggacagnctctgctcctnnancctcnnaagnggcctcattanactcagattgcnagacttntgngcgtccnaancttgccttaaagaataagacatctcttgtgt

SEQ ID NO: 4994 - DNA, 354 bp, Homo sapiens
  misc_feature 309: n = A,T,C or G
aaaaatcaaggaagtcatttgcttacgttcaaaagaaaacggaacttggggtttcagaggagaaactactggaaagagagatagagaaaatccaaacaaaactatccaactcttataccatggatggacaatatctacaggttattaatcaggaaaagggtcaagagaattacagactgctcctttacatctagagattactttgtgctgccatcaatcctttttgttggactgcaatttaactcaatatttactgagtcttaaacatatgcaatgaaatatgctgcatgcaaaagaagattaaaaagngagttagacacagtgcttaatgctctcaagtaaaccacaggtgat

SEQ ID NO: 4995 - DNA, 145 bp, Homo sapiens
atttatgaaactgtagatctagcatgtgataaagacaaaggcaattcttccaagatgattatgactctcaggacatttgtatgagtgcaaccagtctggaatagaaaactaatgaatgatgggcaagaaatcatcaaaaaaaaaa

SEQ ID NO: 4996 - DNA, 153 bp, Homo sapiens
  misc_feature 28, 29, 51, 78, 80, 119, 120: n = A,T,C or G
tatagaaatctagttggcatagtatacnnctgactcttgacacaggacagnaggaaaggctcatgttgagacacatgnangaaagttgaccattctgcaagccaggaaggtagacagtnnttttcggtatttggtccctcaccagggaacgca

SEQ ID NO: 4997 - DNA, 299 bp, Homo sapiens
atatgggagttttcactatgttgcaaatgccaacaccagttctgtgaatcagaagctaaacctggaaccatggcaacatgaggaagctgaagctccaggatccttgaagcgcacactaaagtggtccggatgccatctggcttttagcagaggtatataaaagtccttctgaaggaaagcatcccaaatgtaggcccttggaatttccattgatttaaattcaataaaataaactcacaataaaaaattacagggagattaagccaccatgagtcagtgaacaaaaacaacaacaaaaa

SEQ ID NO: 4998 - DNA, 238 bp, Homo sapiens
  misc_feature 34, 62, 66, 87, 94, 99, 101, 103, 106, 120, 122, 135, 153: n = A,T,C or G
aggaacacagaacactgaggctcacaataggctnaccaggttgccaaggacacagaggaagnatgnagatttacacagagccccaanctgggtnatgcnananatnattctatgacagtnantgtgtcctgcttnccttgtgctgaaaatganagagaaaactcatctagccggcctctctaggttatcatgagattcagcatacacttcgcttcctggaagtgaaccacccaaaaaa

SEQ ID NO: 4999 - DNA, 520 bp, Homo sapiens
  misc_feature 24, 32, 36, 43, 63, 119, 135, 344, 442, 453, 469, 472: n = A,T,C or G
catgatgagggagaagttactcanggggccgncttnttggctncagccctgtggaaggcctantgggctttggacctcacagccaatcagctaggaagccaagactgaatatgtagganaagaataaagacctgntttgtgtgtgaagagttggagtaggaagatcacaggacttcattctggcttcagttcctgcctgggtagattttggcaagttactctaaagtttctgattctccagcacctcatctttgaaagggcaataaaaatactaccttccttttgcttagggttgtagggagggttgcatgagacagaatgtataattgtgctttatgcactgngaaaatctgtgtaaatgttagacttggctactgctatgacatcataacttctggcgggagagaagccctttaatgactagctctctcgcttgctttgnttctttcctgnttccctgctatgaggntgngaattcgtggctataagggtatgcaaacttgtaccatgaatgtccata

SEQ ID NO: 5000 - DNA, 219 bp, Homo sapiens
  misc_feature 34, 41, 63, 65, 67, 69, 71, 77, 81, 83, 89, 122, 130, 131,137, 140, 142, 146, 158, 161, 165: n = A,T,C or G
gctaccttggcattttaaggtcaggaacttggangggtgcnagcccatagcagccaggggagngnangnancttggncccngnccttgnaggggagcctcccactttgggggcccggcgggnaggaattnncttccncgnantgtnggaccctttggnggncctntttaccaccaaaaggggttggttggccgccaacaagggaaccaccaagggccac

SEQ ID NO: 5001 - DNA, 243 bp, Homo sapiens
  misc_feature 149: n = A,T,C or G
ctcctacagtcggggcctgggccaccatcgctgctctcgcatggctgatgagccttatagagcctacatcacatctcttggacctggaaggggaaggaagaggaaaggcctggagactcaccaaaaggaaggaattcagcaatggcagnagtgagccccgaagtcccaaagtctctggattattctttccaccaagccatgttacgcccctaattcaacacttgtcatttctaaaaaaaaaaa

SEQ ID NO: 5002 - DNA, 340 bp, Homo sapiens
  misc_feature 27, 103, 115, 140, 142, 157, 160, 161, 175, 189, 217, 263,265, 269, 294, 297, 305, 312: n = A,T,C or G
aatgttcaaaccaggttttacccgggnatcaacattatggtcattccgtttattctgaagcccacatacaaggtcttggaagcaataatcccgcacaagggtngactagcgatgnaaaatgcctaaacacctttcctggngntgggcctttgcggcnatnncctggaaaaattcnaaagtcccccttgnatttttcaagcgttgggggccaccttanaaattaaaatttctttccttaaggaaaccaaaacttccaccgttgntnggtnttaatccgcccttttgcaaagaatnggngggggggnggcccancccaaccttggggggggaaggaaggggc

SEQ ID NO: 5003 - DNA, 460 bp, Homo sapiens
  misc_feature 198, 211, 230, 243, 250, 251, 280, 283, 322, 325, 344, 365,370, 374, 376, 384, 390, 393, 399, 410, 414, 416, 417, 427,428, 432: n = A,T,C or G
acttgcctggggctgcttctgcggcttcgtgttcattacctgcctttgtttttatctgctctgatgaagcggtgatgttctccaagattgatagaaagagcctactgatccaatttctacgagaaatgaagactatcaagcattctaaatttcctaaacattgtacaattgacagttggctggagcatccagaagctnattattgttgagntttatgggctgaattgggnccctccaaaattngtatgtnngaagctctaacccacaaaaacctggggangcnccccgcatttggaggtaggtcttttaggaggtaatcaanagntaaaatgaaggccattaanagagggccctatcccaaaaangactngacntncttacaanaaaganggngatttnggcccccaccncccncnngggaaggccnngttngaagaccccagggagaagggggacccat

SEQ ID NO: 5004 - DNA, 457 bp, Homo sapiens
  misc_feature 381, 383, 385, 393: n = A,T,C or G
tgagaattcagacttatctacagagctgtctcaggaaaggggaagaagagatggttcctgatgaccacacccagtcaccacagtgactgcctagaagagccatagaaccaactggggtagagtgaacaccagtgacctctgccctgctgcatcccaggcctgagtcctcagggcagacggctcagcgagggcacccggggtaggagcctggtcttccacagggccagatgcacccaagcctttcacacccacttctaagtacaggagagcacgggaaggagagacagccagggctaattccatgcagattttacgatggtttgggacagattctctcagtactttcagagatctctccatcttgtcactttcatacaatgngngntatttttnctccacccccatccatgtcccaagttactctgcataaaaattcttgagaacaatcaaaaaaaaa

SEQ ID NO: 5005 - DNA, 384 bp, Homo sapiens
  misc_feature 314, 319: n = A,T,C or G
atataaaatgtaaacaacgcactctaagttgccggaacaaggccaagcagcgccccaccagccagggaggagagctgcttgtgacatgaccacctgctggccccagagtccccttgccacccctgaagggctacgaatcccagaagcacaggtaacacagccacgcgactcccaggttgatgcagggacagatggttgagcggctttccacctctgcagctttagctaaattatggaggctgagatatgcagagaaacatcttcaggaaatacacacaggaggtgcaataaaacacttctggggctatgtgtgntctgnttatttagcagtttgtgaggtgaaaaacacatcagagtaaaccacttttcctccaaaaaaaaaaa

SEQ ID NO: 5006 - DNA, 313 bp, Homo sapiens
  misc_feature 21, 29, 81, 97, 111, 122, 134, 197, 199, 200, 203, 208, 210,212, 214, 217, 219, 226, 229, 230, 236, 245, 247, 250, 252,255, 256, 257: n = A,T,C or G
attctgatcccaaggcctgcncctggccntactgcatggagacaaggaagtccatggggttctttagagaacactcaacanctaatcgagtcaactntgccctttatgctntgaacagttantacgagggcctncgctgggaacacactgctcctggcaatcactttattgacatctgtggctgtgtgccactaccntnncgnacaanantncngcncnaaaaccnacnnctcacntcaaagaancnacncnacnnncaccctgtggacaaagctggatattgctgcttaataaaagctaatgatggtaaaaa

SEQ ID NO: 5007 - DNA, 113 bp, Homo sapiens
  misc_feature 30, 32, 45, 51, 53, 58, 65, 83, 97: n = A,T,C or G
taccagcttgtgatatacttttaatactanantctcttaaacttnggaaanantgaangccaggnccaagggtgggccaatanaagctttgtgattnaacaaaccctgaattt

SEQ ID NO: 5008 - DNA, 159 bp, Homo sapiens
  misc_feature 21, 85, 87, 95, 104, 109, 111, 116, 132, 135: n = A,T,C or G
gcttttctttaacacccctgncaagcagcttccctgctttcaacttccccaagaaaaaatgcccacgccccccttatagaacctngncccttttnggaaacagntgggnantcccnaaaagccttgaccccncangagaccctttggaacttaaacacc

SEQ ID NO: 5009 - DNA, 147 bp, Homo sapiens
  misc_feature 94: n = A,T,C or G
gtgttggtcttctctgcagcatatctccagatcatcgtcagcaggactgagttgaacaaattgaagaaaacaacagtattgcttttcagattcngaataatttgcaatattaaatttgtagatcaaatcagcatttaaaaaaaaaaa

SEQ ID NO: 5010 - DNA, 286 bp, Homo sapiens
ttaagagctccaaaatcagactgcaaagctgtgtcttatttccgagcattctttgtgacaatggaaaagacttggatggttgcaaaactgcagcaacgtacagaacacagttatcacacacggtggaggggccagcaagaaggtgctgactcgtaaaaagtgacatgaatgacagtaaggctgacatgaatgacaacgagggctacaaccaagtgtatgtttgctcccatctgaaaactgaagccaattctttaggaaaataaaagacaagagagagaaaaaaaaa

SEQ ID NO: 5011 - DNA, 365 bp, Homo sapiens
  misc_feature 17: n = A,T,C or G
gcaacactgcagcccanggaaccacccggaggctgaccagccttcccgtacaagccatcagaaaggggaggccacccgggtgcccaccagcgggtgatgaagacagacatggaggacgacagcgaggaggaacctcaaacctcgtgctgtgtgaaaggagcccatctcgagaggtcacacagtgtaggatagggcgtaccagctggcgggtctggggtctcctgggagggtgaggaaaatgtctcggaatgagataaaggtgatggctgcatagcacgatgaatgcacaaagggtcgctatgtttcaaaggggttattttatgcaatgtgaatttcaccttcatttaagaaaaaggagaaaaacg

SEQ ID NO: 5012 - DNA, 285 bp, Homo sapiens
acatacctcacttgcctgtggtccagtttggatagtcccagcacagctttacaggaataggccccaaaccgaacttccaaggaggaaggatctgatcggctcagcttggatgaggaagcggagggagagtggactggaaggaacttgacccaggatgctgagtaagcagagctgtgaatatttgagttcaagcagttgggctcccaaagccggtgatgttaaccctaagcaccttgtcatcattataatagtaatacttcatttctagctactcagaaaagaaaa

SEQ ID NO: 5013 - DNA, 328 bp, Homo sapiens
  misc_feature 40, 53, 59, 70, 74, 91, 101, 115, 141, 149, 168, 171, 180,191, 197, 199, 203, 207, 209, 212, 230, 239, 258, 263, 266,284, 310: n = A,T,C or G
agtcttcttcacaagtactttttcaggcatctaaagccgnattccctggccanagaagncaacaagcccnaatncgtcccattcccccagntgggattcgngatgaaaaaactgngaaattaaaagatcaagtgtgaccanacttccanaaaaagggaggaacatttnggntaaggaaanaaccccaaagncttggngntctnattnanggnaatttgccaccaatggangcattgtgnctaccaccattatttttanttgcnttngctccttggaaaaagggntctaccgcaatccaatttggttttancccacttaattccaaagg

SEQ ID NO: 5014 - DNA, 266 bp, Homo sapiens
gcaacccacaaggctgtgctggatgtcagtgaagagggcactgaggccacagcagctaccaccaccaagttcatagtccgatcgaaggatggtccctcttacttcactgtctccttcaataggaccttcctgatgatgattacaaataaagccacagacggtattctctttctagggaaagtggaaaatcccactaaatcctaggtgggaaatggcctgttaactgatggcacattgctaatgcacaagaaataacaaaccacatc

SEQ ID NO: 5015 - DNA, 110 bp, Homo sapiens
  misc_feature 21, 37, 38, 43, 47, 52, 72, 74, 77, 92: n = A,T,C or G
agggcgcaatcacccaatacnttatcaccaccactanntctanaatntacanttatgttgcgctgaattcancntangagaaattgggattntcccgttacgtctcacct

SEQ ID NO: 5016 - DNA, 317 bp, Homo sapiens
  misc_feature 103, 232, 241, 270, 283: n = A,T,C or G
tagaactgtggccaggagtcaagccccaggtcaagaatgctggtcagccagcagactcacatcccagccctaccttcctgatacctggatggtgggtgctcangaaaaaacaagggaatcccagggcttgttaccccagtgtctccattgtgccctccacaggatgcacttcaactgtcctctcttcttggctcttcctcctacaaacttggggcaaacctgggaatccagnaaccaagangacttttgggattgaagcaattcccagtngttaaaccccaanccctaagttttttttcacccaccgaattttgggg

SEQ ID NO: 5017 - DNA, 411 bp, Homo sapiens
  misc_feature 337, 378: n = A,T,C or G
ggtccagaaatgtgttgtaaactgcacaagcttaaaggtctcatccgtattttcatctatggcttgcttctccatttcattcacaaagatgttgggagagatgtaaacacccgagtagactatgcacaccacagtccccctgctctaccaagctacttttcttctggcgaatggctcaaccccagctcttattgctcattgccatttttctgatggaatgcagatatgctgactggagcaggagcagccatattgcattataaggtaaatttaggaatggagacatgtttttcagagcaaaggaggaaaggttcaagacagaagaagcatttgtggntattgatatcataaagcatcacttcagcagccttaaactgntgacttaaaaatttgggggaaaaaaattaactt

SEQ ID NO: 5018 - DNA, 471 bp, Homo sapiens
  misc_feature 278, 324, 342, 353, 354, 361, 412, 428, 429: n = A,T,C or G
gagattgggcctacctgtggatgcctttgtacagaactagaagaggactgaaggataatttaattcagccttctcattttccagactaattgcttcctgaactaggaagggtgtccaaacagagacctaggaagtttgatatattccggatccttcaactgctgggattccagatgataaataaactgcgcagcggaatttgtatcaacctattcacagacttgaaaggagtaagaggggttctgggagagaaggtgagctcacttctgcagatgacnctactcactggccacaccatgctctataaacaccctgcaccatctntgatggtcagcctgccangctgcctggannaaaccgnccttgcttctgggagccttggaattaaaacacttcactttataactccctntttattttttcccganngaggttatttttttaccttggctcaaaccatttgggctggaa

SEQ ID NO: 5019 - DNA, 301 bp, Homo sapiens
gtgcaggatgatgtctaagcactcaccgtgtcccctgaagccacatctgctgtgtctcctccaagtttgactccagctccaaggactgaccttccccaacccaagacttcctccaggctcctccctctccaaaatgctctctccagatccttgaatggctaacttctaattcttcagatctcaacttagatgtctcctcggagaggccgctccaccccaaattctcactgtgccccacagcgctgccgagtcccagtgcccctgctcatgtgcacacccggggaggctctgttgcgagctt

SEQ ID NO: 5020 - DNA, 131 bp, Homo sapiens
  misc_feature 52, 98: n = A,T,C or G
gtatttattatctcagcaagaatatgaattataataataagacaaaaactcntttctatacgaactgctctttcagttgtagccactgatgtaaatanaaggaagttaaagaataaaatgctcgttatttt

SEQ ID NO: 5021 - DNA, 408 bp, Homo sapiens
  misc_feature 50, 194, 195, 235, 295, 339, 385: n = A,T,C or G
ctgaccctttgatggagctactactgagcagtcacatgccctgaagttgntcactttctacccagagcatcgtgttaatgcacatagattctgcaacacaggctacaaagattcaaagacagctttgctgtttgctagctttgtgacctcaagcaagttactgaaattcctgtccctccgttactgcatccatnnaagggcagttgcaaaactagtacctgcctcatcagggtgntgtggggttgaaagtgaattaatatatgttcggtctcgaggtcagcgcctgttgcataancactttgtatctgttattattgccttcaaaactctcttcattgnctgggaacgactttccagcggcttgcataaattaagtgtttaatanatacctcttcatgaaaaaaaaaa

SEQ ID NO: 5022 - DNA, 298 bp, Homo sapiens
gccttgaaatacatcctgtgatcggtggggtcccggctttgggagcttctagcctgttctaccacatagctgtttgtttcacgcttctaaccaattaacttgaaataacaccctgaatcagaggtccgaaagaggaaatcaaagatgccacatgatgttcatatggagctccgagaagaacactttgccaaggcctggagaccctccagggctgggagtctatggccatttccacaccagggctctggggcctccactgacaaagcctacctccctgatcctcaaagagctgttataa

SEQ ID NO: 5023 - DNA, 234 bp, Homo sapiens
  misc_feature 32, 40, 68, 72, 75, 160, 187, 215: n = A,T,C or G
cacaaatggcaacccccataagaaactcaatngtctggcnttttcttcttaacttcccacccaatttngggnaanggggaaacctcttggaattttggggtaaggttattccctggggccccccaagtggaaaattggaaccttccacctggcaattaanggggcctttcctccttgggtttctttnaactttcccccttcttcaacttgggggntttggaacaaaatcttggc

SEQ ID NO: 5024 - DNA, 356 bp, Homo sapiens
  misc_feature 95, 109, 112, 116, 117, 118, 124, 135, 137, 141, 144, 147,148, 158, 159, 160, 168, 170, 172, 175, 182, 199, 216, 313,317: n = A,T,C or G
attaagaccctggggcttggagacagcaagtgactgtcccaagatcactcagctgataagtgatggagccaggattccagcctagactgtctgantggaaggggcttgnacntttnnnccgaancccaaatgggnanttcnatnaanncagggactgnnntttttgantntntanccaaccncctgccacatggatacntcatggaaacttgacanaacaaaggatttattttttattaggttaaatctgcttcttgggtactgtttgcttgctgcccattaagtctggacatcttaaattttgaaaaaaaanggcncttggattaataaaaacaacctgggaccggaaaaaaaaa

SEQ ID NO: 5025 - DNA, 372 bp, Homo sapiens
aggcttaggaaaaagcagatacctcccagtagcatgaagatgcaagaagctgcagttgcctgtagcaaacacaacgtgattgtaacaggtccccatggcccttggtgcatggaaaggtggacaagcaggggatcccgtttggattctctgagaaacttctcagcttgaccacgtctgtctcaaggtttggctgcaaggagtcacacagaaaaccttgctttcctacttcctctggccaggaaccttctgaagttcgctccatccccaagcaaagagttttcattccaagcttgagcaaatctggcccgttggacttgaaatcaatgagtatgaaggaggaatacaccttttcccttttcaaagcaaaaaaaa

SEQ ID NO: 5026 - DNA, 206 bp, Homo sapiens
aatgaaaagcattggctgcctctgccaggatgacaactttacagtgagaagctggagccgcggaccatgaactcctggaaagttctatcagggcctcagaagggctcaccaccttcaccagcctaaacttagtggtcacccatcccacgccaccctctgcatagacagggcatctgtgatatgggaattttttaaaaataaaaaga

SEQ ID NO: 5027 - DNA, 198 bp, Homo sapiens
gtggatgcttcatcctctcttcccctctgtggctggatgcacacgagcacagccagcgtggatgccaaggacagagctgcgagatggggagagcctgcgttcccagacacctcttggaggagagctgcccacagtcagcaacagccatttgggactttacacaatcaataaataaacttctactgtgaaaaaaaaaaa

SEQ ID NO: 5028 - DNA, 494 bp, Homo sapiens
  misc_feature 27, 347, 400, 421, 437, 462: n = A,T,C or G
gtggtgttgaaaccgtcttccctgcanaggctcttccggtgaagccgctggcctgtaaacacacttttagccagaccctcctcggtgccctgagtgccaagcggatcctcttctaccatcttgctgcccagagttcccatggggagatgggcccacccagctccacaccccagaaaacctgtactctcctgcatgccttcacccacccctcaccaaacacaggctgggcagcaaccatgtcgctgtcctggaagggtgacagtcacaggctcagaagcagggatgtcctggggaagtcaaggaatcgcagacctccaccccacttcacctgaggattggcactgcangacgcatccccctggggtctgccggaggtttgggtaacaccttcatggcagangctacaaaaatcacttggcangtgcttctggcaccangaggaatgtgaatcttgaaaaacancattttggtgggggttggaaaaagcaaggccc

SEQ ID NO: 5029 - DNA, 232 bp, Homo sapiens
  misc_feature 24, 31, 32, 103, 108, 116, 121, 123, 134, 137, 142, 147,150, 156, 177, 183, 191, 204: n = A,T,C or G
ctcccctggcatttaaagcccagnaactgtnngaaaatccctggggggccttgctttcttgcgggctttcgtagttcatttaccctcgccttttgttttaaanaccanactcctanacccngngccgccgcatnggntcctncccanagnatttgnattacgcaacaggaggccctnacctgnatgcccanatttttcttaccnaagcaaacatgggaaagcaccttattca

SEQ ID NO: 5030 - DNA, 364 bp, Homo sapiens
acaacaaggaacacataatctggtctcaggaaacattttgcatcatctggtaaagggatttctgcctcatcagattacagactacatgtgaagccttgaaggatagctccaaggagatgcgtgagcacaaggcagtgtcctcacagtgagctaggaagaggcttgcactgtcactgccagtccgtttgtgcatcagagaaggcctaagcgtaattgagcagtcattgctgtctcctccagggggaggaaccatcctcctcacagatggctgaagatcttatgaagctgaacctcccaacaaatcctcatatttcgatacaaataagaatatgattgtcaatattcatacaatgttttaaacctt

SEQ ID NO: 5031 - DNA, 279 bp, Homo sapiens
  misc_feature 17, 43, 50, 61, 62, 79, 90, 103, 126, 127, 161, 214, 219,222, 224, 250, 253: n = A,T,C or G
actccctgcctttaagntcagaaaactgtagagctgggggggngccaaangggggtcaaanntggcttcaataacgggnccccgggtctncccggaatgctcntacttcccagaacaaaagaaggnngcccccatgaattccacttgtgggttcatccatnaaaatcctgggaacttagtcaccaattatttttggatttagtcaccagaaaangtagnttntnaaggcctgtttggccattaaattttncanggggtggggggggcagcaaggaaagg

SEQ ID NO: 5032 - DNA, 463 bp, Homo sapiens
  misc_feature 331, 351, 353, 405: n = A,T,C or G
gacatatttccagggagtaaaaccaagagatcagcacattttgaagaatgtttttcaagctgcttttctaaaggtggctgcttgggatgactccactcccattcgctcactcccacacctcccacccatgcttgcctggccctgccattaacactgcagaagaacatccaagtgtttgcattcccagcatcccttgctgcagggttggcatgtgacccacttttgggcgatgagacaccaacagggtgctcctggagaccctctactttcccaggaggcgaggctgccatcttgccaccacaaggcaacggagagggccacgtgcttaagncgatgaacagaaagctttgnangagcccagtacttggcatcaccaagcagctgaccaaggccatcaacccaccngttttcagaatttatgatgtcagaaaaataaaccttaatttggttaagccaaaaaaaa

SEQ ID NO: 5033 - DNA, 568 bp, Homo sapiens
  misc_feature 501, 503, 517: n = A,T,C or G
gaaaacatcctccccgccagcctctcacagaagagacctagatttcatctgccacgtggagcaggcggtctcagaatcccacccggagcagggtccagggcaagtcttggaggacagtcaccaagaactgctttggattcgggaacagagctgcctaacccatccgcagccctggggtcctgccctgttcctctggccccttcagggcagcgggggaagcagggaaaacagcctgtcagagatggcagagaaaccgagcaagaataattatcctggaaaagactttcagaagtaaccaccagaaacttcgagtccccagatccaaacagctgagaatgtggggcctgagccacgctctgactccactcccaccacatgaggagaaacaagagctgcttttctggaagacttgaacaacccctgctggctctggaaggacacatattccaaagaacaacaggactcagatgaaaactggatgacaattagaagaactatttntnaaggctgggccagnggctcacacctgtattcctacactttaagaggccgaagccgggggttcata

SEQ ID NO: 5034 - DNA, 756 bp, Homo sapiens
  misc_feature 25, 30, 43, 45, 53, 73, 76, 83, 95, 97, 100, 108, 120, 201,211, 235, 254, 267, 358, 375, 378, 384, 387, 423, 439, 444,454, 456, 471, 484, 486, 499, 531, 537, 543, 553, 571, 573,574, 576, 580, 597, 608, 627, 659, 671, 683, 696: n = A,T,C or G
cctgtcatttatagtccatagaaantgaantacagtaacttgnangcagcagngctggggcagcgagtacctnttntttgggnagaagcacgacncncgnactcgctntcattgctgtgntgggctcctaaaaaagaccatgcacgtatccccgattctctcatcgccagaaaaggttagaaacaagcccaaatactcttncgacatcctncaaggccaaccgccgcggtatggnaaaagggacccctttgtanaggtgtcccgcgngcggacacaaccgtggaacctcgtcgccttccgcatgctccaccaagttcgtgccttggacatacccagccaagcccctagagcaccaaanggttgtgtactcaagcncanggctanagnactcccaagtacacaaatccccacacacccggggcntgggattcctgaccgnaccanggggaccccnangtatcggcccaaggntgggaaaaaggtngnaccccaccaagcncccttggcttctttaaatacaacaccccctgnggaaanggcctnggacccaagnttctttaccggccaccgngnncnccgnaaaggccggtccgggtnccaaaaggggnaaagttaaaaaaatgggtnaagctcttaagcaaaaaattccttttaaaagnccccccaaggtnaaaaattttttnttcccttttggtncaattaccttttaaaattttgggtgttttttaaaccttaaattttaacaacccctttggt

SEQ ID NO: 5035 - DNA, 159 bp, Homo sapiens
  misc_feature 17, 52, 75, 76, 77, 100, 129: n = A,T,C or G
cccccccttttgaagcnctctggggggaaacctacctggctttaactccagnaactggcagaaaaattgaccacnnnaggcaccccccaaaaaatttatncttaggaaaacaccaccggggggaccacnaggaacaagccaaggataaatttttgggaa

SEQ ID NO: 5036 - DNA, 362 bp, Homo sapiens
  misc_feature 28, 31, 263, 340: n = A,T,C or G
aatgtttattggaggcttgagctggganacnggccaccatctcaaaccgacaagttttcatgtttcatcacagttgcttgacatttttataaaaggaacgcaatattacagataaggctgcctccttgttctcgttctcagggcactctccccgcaggtaccatgaatttcacccccctgaatctggcgtgggtttctccagtccactgtttcatgtttacacctacagaaagagatatctatgaataattcataagtgtggnttgccagtatgtttttaaacatttcataaatgatattacacagtgagcttgttttgcactcaacataatggttttgngatgtaaccatgttgatatatg

SEQ ID NO: 5037 - DNA, 108 bp, Homo sapiens
  misc_feature 21, 35, 57, 61, 64, 69, 74, 81, 82: n = A,T,C or G
agcagtctcagcgtctcaacntgtgctttcctccntccagtaccctctgaactcctncaancanacatntgttncctgctnncacattcgctggcaaccatttcgtgg

SEQ ID NO: 5038 - DNA, 274 bp, Homo sapiens
  misc_feature 18, 30, 66, 69, 70, 97, 104, 112, 128, 135, 140, 153, 179,206, 220, 254: n = A,T,C or G
gaatttgcctcggaaacnctcttcattacngggcaccaaaaaaggcatttcatgataccattttgncanngtggacacttccatcacttccctgtgnaaaatgntccaagtntatctttaaccaacanaatagtnattgnggagaaagggaanggaaccagtacaacactacctcgganaggcagacatcttctcttatcaagacnaatgggaagctgtnggatctatgaaagagcacaagactcacctgccantatacctggattccaaatga

SEQ ID NO: 5039 - DNA, 282 bp, Homo sapiens
  misc_feature 185: n = A,T,C or G
gtaatcccggccaccagtctatgaagtgggaatcacttgacatagaagaggaacagagaacactgaggctcagagaggctaagcaacttgccaaggccacaaaggaagtaggcagcagccaagaaccccaacctgtgtcatcccaaagtttattctatgacatcattgtctcctgcttcccttgnctgaaaatgagaagaaaactcatctagccggcctctctaggttatcatgagatcaaatacaaacacttcctggaagtgaaccactcaaaaaaaaaaa

SEQ ID NO: 5040 - DNA, 440 bp, Homo sapiens
  misc_feature 398: n = A,T,C or G
actgctgctaccctgccgagaagtttgctgcccgtggcattgctacttccatgaaggaaatctatcttctcttttcatgtctttgttctgaaattttcgctgtggtatttctgagtataagttggtttggctgtgttgcctggcgctggccgtgtcttctcacctgagatagctaagtttcagttcccagcccttcccggccatctgtcctcccgtggcacctctgcaccctgacataattcttgttctggatctcctaaaagggagtagcttgcacccattcagtgtcttctccatctctcaaactgcgcttcccagtattggtctctgtgttctcagtttacgatcttccagtttactaagttctgtctccatccaattaagtttgtttaatctgntgagtttttaaataaaaccgcattggtctccaaaaaaaaaaa

SEQ ID NO: 5041 - DNA, 127 bp, Homo sapiens
  misc_feature 18, 29, 41, 48, 51, 65: n = A,T,C or G
ttaattttgaaaaattangttagaagaantctacgattcanctaagantancactcacaaagacncagaatgtgtcgtcttagaagttagcctttcagtaaacgcctttggggtgttgggggatggg

SEQ ID NO: 5042 - DNA, 331 bp, Homo sapiens
  misc_feature 263, 312: n = A,T,C or G
gtgcttgcctgctatgctgtcaaagctttgtgagcactgtaattagaacaaaatggatgtccttggaattaaaaccccaagtcagtaatgattgaccacaaagtagacttgttcaattgcccccatcattcactggtatataataccaagtaccaagattcttaccattattatgtcatcctatattaattctttcattcacacatataggatgaaaaacaaaggaatgtttatcctatataatgttcctttatgatttttgnaataccattttactggtggttatgcctatagcacccattcgactgatgnttataaaccaaattgagaa

SEQ ID NO: 5043 - DNA, 138 bp, Homo sapiens
  misc_feature 18, 21, 23, 71, 73, 81: n = A,T,C or G
ctgaatggaaacctttcngangncggcttaaccattccactataaaggaaggaaggccagaggagaaaacnangaggctgnggaggaacatccaaatgatgttgaactggggaaaaagaaagagaatgtgaaagagga

SEQ ID NO: 5044 - DNA, 502 bp, Homo sapiens
  misc_feature 103, 445, 476: n = A,T,C or G
gcacagctacagccaagtcagaggccctggggctgactgggacccagaagagaaatgagagctggagaagaggaacagacaagcctctccaacacagcacggnctctagctaggctggctctgagacttctagtgaccttgagacctcataacttcagaaatcctttatcctccagcctatcaacaatcaagagtcagacaacagtgtatcatggaatggacagtggtttggggcaatcacctatcaccgaacctgaggcaatgttccctgtaaaagacaaaagacacatctacctgccttcagcctccatcagcattttccagtttttgatcaggagtcagtccttttgcatgcagcctccacacaggtggctcatgctgaggagcctttgtactgagaccttcattaataagcatacgcaataactgctctgacacgacttgngagtatttcatcattttggttaaataaaggngtttgaaaaaagggtaaaaaaaaaaa

SEQ ID NO: 5045 - DNA, 429 bp, Homo sapiens
gatgcctgggaaatcctcaggcggaaaggaagatgctgccaggaggaaactggtgcagcagcatgtgtgtggaaggcaagtgccaaggggctgtgtcaagggcactgaggacatcggctgaaggggcctttgagatgtatctgcaggttgagatgctgaaacaaggagaagagaattcacatacgacgttccagtgagaagtcaagcaggaggccataattctgggacactagcatgtttggctaaggttagcataagcttttcaaaataatttcctttctaaatatcccttgctgtgaagatatcccctctgcaacagtaactggtgtgcgctcctctgcctctccccagcagcagtgacctcgttgaggctgaattgaatttctggaccaacacttctccctcaataaaatttcactgtgatgggca

SEQ ID NO: 5046 - DNA, 373 bp, Homo sapiens
  misc_feature 25, 58, 65, 66, 72, 73, 97, 105, 113, 123, 125, 136, 177,200, 207, 208, 213, 220, 276, 278: n = A,T,C or G
gatccaatccaggaccccatgtggncttcagtcttcacatctccgcagtctcatactntggcagnntctcannctctacttgtctttgatgatattngaaggaangagacaanatggcattgngnaaccacagganaataagacctataaatatttttgactcagtgggaatagtancatcatgaattgccctgctttcnaagctanntagantataggnttcattggcttggcctgacatgactgcttacagctgatttccaaacattcttgagngnattcctttataaactgttggcaattgtgaagactaaataaaatacagataactctattgcattgggaataaagatgacttttcataaaaaaaaaa

SEQ ID NO: 5047 - DNA, 193 bp, Homo sapiens
  misc_feature 23, 35, 43, 53, 58, 73, 82, 85, 86, 87, 96, 103, 139, 141,145, 150, 153, 173: n = A,T,C or G
aactaccttgcatttaaagtcanaactgtagaacnacccctgncccccctccntgtcnttctaatgctctatnctcaaaccnacnnnccccaaccncctttcncccctagaagcataccttccatcctccctttaaccngncttncttcnctnaccacaccatttctcaatcncacacttctttgaaaaaaac

SEQ ID NO: 5048 - DNA, 180 bp, Homo sapiens
  misc_feature 154: n = A,T,C or G
aatccatactcactgcataaactttgcatgatgctgtggtttccaagcatttattcgatgacatagtaaacccactcttattttgtctacactcactttttcccacaaagccattgtgatgctttagttgaatgtgtttggtaaagtaacagtngaataggaacctgccaaaaaaaaaaa

SEQ ID NO: 5049 - DNA, 116 bp, Homo sapiens
  misc_feature 32, 51, 53, 59, 64, 70, 74, 76, 79, 94: n = A,T,C or G
ttcccctttgctgactgtttaggtggacacangctggttgcacccatgtananataaanagccntgttgntctncngcntttgagaaccataanaacagtgtgtggtggttaaaaa

SEQ ID NO: 5050 - DNA, 313 bp, Homo sapiens
ggaagaccagagacatactcttaacaccacatctcagggacttgccgccaccagagagcccatgctgcaatgtacaactctgctgaaagatgacgaaaaggaagtgtgcaagtcctggaacaccaagagacgaacagtgctggaacaagggctgggtagcaaaagaatttcctgcagctctgtttcaacattattttttgtcttgccattatttttgtctaccttaagtcagaagctcctagggaccagaggttatattcttgatatgtcacagtgctaaataaatattgaccaactgactgaattaaaaaaa

SEQ ID NO: 5051 - DNA, 203 bp, Homo sapiens
  misc_feature 33, 54, 66, 79, 92, 93, 95, 100, 101, 102, 126: n = A,T,C or G
aagagctgcatgataggaaagaaaaaagtgganacacaatggagaaggctgccntctgccagccanaacgagagccctngctgggaggtcanncntgctnnnaccctgatcttatacttccctgcncactggtttctatgaacacacagctttctttctaggtctcagtttactgatttgatagatttccaatgtgaagctgg

SEQ ID NO: 5052 - DNA, 371 bp, Homo sapiens
  misc_feature 288, 353: n = A,T,C or G
agtgaagcggatgattctgctttgagatgagtccttggatgatgcactgcatgataggaaagaaaaaagtggaagagctgaatgaggagagagaagatacattagacacacaaatcctaagagtcttctgacaatgggatgtgctgtttctttccccccctgcccactgttttctatgacacacagctttctttctaggtctcagtttactgatttgatagatttccaatgtgaagaaactgcttttaaagttatctaagaatgcttgggtgatgtattcatggtggngttcctttaaacatcaaatgtctttcttgccttaaggccttattctcaaaatatggggtccctcncagtaaacaaactttatg

SEQ ID NO: 5053 - DNA, 369 bp, Homo sapiens
  misc_feature 100, 103, 115, 117, 138, 143, 188, 202, 207, 208, 209, 211,215, 223, 224, 226, 232, 236, 238, 240, 245, 247, 254, 260,261, 262, 263, 269, 271, 297, 300, 307, 324, 330, 338, 351: n = A,T,C or G
gatagaaaacaagttccactgctcaaaattactccttgaaggggatgagggacaccagggatatgccaccgggaccacttgaagggaatgggtgatgggnttnaaacaaaggtantnttttaaatggagcaagagccnattgntttgctcttgctcttgtccctcaccccctcaaagaagaaattttnccctttattattanagcannngntttntctctttnnancggaancttncntngtttnangggaaantggccnnnncttaancnaaaattggttttaataaagttgcacncancctccanggcaccaatttgtccgnaaattnaaaaggantattggaaaattnaaggtggaaaaaaaaaaa

SEQ ID NO: 5054 - DNA, 382 bp, Homo sapiens
caacactaatcagcctaagataccaggtgaagaaggcagagaagcagtgaggagggaaggaggagaacacagattttctccctctcctcagtggatttgggaagttgttttaagactgcatccttggcaagagggtactccgcagctatgtgcttgacgcaagagtgagtgattcatcccaccacatctcaaaagtctgtgagtcagccagttcttcctgggctcagacctttgtgagagtggggatttgagttgactacgtgtgttgaagtgagggcgttgaagattgtgtaatggttttgttgctttttaaccagggtcaggattgacctttggtgtgttgtcagggttgaaattaaaaggtctgggtacaaaaaaaaaa

SEQ ID NO: 5055 - DNA, 332 bp, Homo sapiens
  misc_feature 203, 225, 233, 300: n = A,T,C or G
tacctgcattaagtcatgaactgaggtaccatgagcaatgaggaagcaggacccagacccctgactcctaactccaggtgaagcccaccctgagctcaggagcagagctgcctccatcgggtgtggagagacagagcctcctccccagccatgcctcctcatcggcccacgggagctgctgtgactctgacccctgtacctgnctctgtcgaccggaatagtcangtgggcangccagcacacctttgggtgctctgtatgagtgggattttctcctgattagacattttaaaagattgncaacaaaaagaacaaactctgtaaaataaaaa

SEQ ID NO: 5056 - DNA, 270 bp, Homo sapiens
  misc_feature 118, 129, 134, 173, 182, 185, 187, 190, 202, 205, 219, 223,232, 233, 235: n = A,T,C or G
gcaatttcttggtaatgatgcagaagtaggcttggaaaccaagcagaagacaggaaggtatttagcagcctggaagatgcctgataaacccagtctgatgaggtgctttcctaccttnaccactcaacnctctnggtggctaccaataaacttggcatgccatttgggataanggggtttgnccngnacnaaaagtaacagnggnaccacccaatttgnggantaaaactcnngntttatttttttaacccaaaaatcctttttgggtat

SEQ ID NO: 5057 - DNA, 219 bp, Homo sapiens
  misc_feature 24, 29, 38, 42, 48, 56, 59, 61, 73, 80, 88, 100, 131, 138,150, 167, 179, 202: n = A,T,C or G
atgccacattttgcttaggatgtngtctngatgtagantgcnagtagnaggcaatnggncncaccttttgcangggaaancaccatgngcagtttctgtntggtaactgataattcttcttcaccacatcngatgcanaccagctctatngatattttgtctacaanccccaacataantgttttgatccttatatatctgntccccttactacatagt

SEQ ID NO: 5058 - DNA, 131 bp, Homo sapiens
  misc_feature 56, 65, 69, 72, 81, 98, 100: n = A,T,C or G
ttgatgtagggctctccctaccttcaccacctcaacactcttgccttgctaccaanaaaactgtnactnccntttgggatnaaaggggtcttgttcancnctacaaattacaatcggatcaacatattttg

SEQ ID NO: 5059 - DNA, 220 bp, Homo sapiens
  misc_feature 64: n = A,T,C or G
cctctatcctgaagagcgttggaccctggagctgctggccacatcttgatctgccatatgtggnccaagaatgaagtcaacacgaaggagaatgaaggtgctgagggataaagttattgacattctaggagctcctggatcaaaccatgcctgaactcaatttatcccttgaacttttcaattacatgaataaatcctccttttgcctgaaaaaaaaaaa

SEQ ID NO: 5060 - DNA, 153 bp, Homo sapiens
gggaaacccttcttaaagcaagacaggtcttccttgagtttttcatacttgaaacacctgaagattatcagcagaactgggaactgaattttcaccttgtaatgtcactaaaatgccctttgttctatatgcactcagacaataaaaagaaaa

SEQ ID NO: 5061 - DNA, 186 bp, Homo sapiens
  misc_feature 19, 38, 57, 64, 97, 140, 155, 165: n = A,T,C or G
ttcccaccctctttgtagncaaaggttcaagcctaggnttaagctccacagactagnaatgtgngccacatctcttttagcgtttttaccctagagnacaggaaaattacgtcatgaaaggaccacgcgtgcttggtgtnatgtgtgacgccccnacatgctgtncacgaagggaaaaaaaaactg

SEQ ID NO: 5062 - DNA, 302 bp, Homo sapiens
gtgttgagactgaggttcagaggccaagaagcttacacatgctcacacagccagggagtagcagagctgggatttgaatccaggagtgtctaatcccaacgtccaagacttccatgaacccatcctgcttcccttccaagtctgcaagggaggtccggatacaggagctctacagggcattgatggtagcttctgcatttacttaatttatgtaactttcactgatctagtataatactagggactgactgtttcttgagctttacaaatacaacctcatttaagcttcattaaaaaaaaaa

SEQ ID NO: 5063 - DNA, 541 bp, Homo sapiens
  misc_feature 400, 519: n = A,T,C or G
ttgttaggagccactccgtcatctgctgctggattttaatctaggcctctaatatctttggcgacatccagtttatcctgagttttcggagggactggtggccactgcttctcaggacttcctggaggactcagagatttcctggccaggatctgacctccttcaggattgacaggacaattgtggagccccagtctctgaaaacctccaacaagagaagaaaacaccggtctccagggagagagcaaagggcttaacgaaacgatcccctctccaatgccccttctccctgagattctgcagatctagggaagtgcaggtgtccagcctgtgggtgtcagaatggctggggagatatttcccccacacggacagtcagtcacattggtcacctacatgncggtatgggcagaaatcacagagtcctcacctgggtccacttacctggtgcaacaggacttattttcaaatcatcaaggccaaaaagcgatcggaatgagaaaggggcttcaacagcangcggatcatttttccccattgg

SEQ ID NO: 5064 - DNA, 214 bp, Homo sapiens
  misc_feature 40, 57, 61, 68, 71, 77, 81, 88, 100, 104, 167, 171, 177, 198: n = A,T,C or G
tagagacggagtttcaaccatgttagccaagatgttctcngatctcctgacctcganaccntcgcggnttngggctntctnaactccnccctccctgggngctngaggccagaaagcagacacttcctgcagctgcagttacacaaccgatgttctggggatttttntggncaatantgatgcgatcctatattctanaaaacccccatccatt

SEQ ID NO: 5065 - DNA, 105 bp, Homo sapiens
  misc_feature 74, 81, 89: n = A,T,C or G
gacaagaactacagcgagaaaagggagacagaagaggatggacgttgctttgcaatcaaattgcagattttttnccatgcntactgggnttgggaaaaaaaaaag

SEQ ID NO: 5066 - DNA, 467 bp, Homo sapiens
  misc_feature 424, 450: n = A,T,C or G
ctgcatccctctacccaggcgaagaaaggtatctctcctgggaccaccttggctctccttcatgggagttgtattgcagcaggcagctcattattcttctgctcctggaagtatatgtttcaataacgatctgccttgtgttcagactccatgggtcaagggttaatgtcctcctactgcaacataaagtatttttcatctgatcacactgtgggcattggctgaaaaatgaatctgctatccatgggggaccaagacattgaaaaggctgtatttggtgtgctctctaccctcttgcttctatcctgttgcataacttgaccaactggtgaaacaccagaagatggaagaagcaaggaatacattctcccttagagcctccagagagagcatgacgcttgcagcatcttggattttggttcangtggaactgaatttctgacttctggnccttcagaaatgtgaga

SEQ ID NO: 5067 - DNA, 518 bp, Homo sapiens
gatgaagaaataaagagagggtgaaatcattctgggaagtctccttgaaaggggtgagtcataaagagggggttgggtgcaggtgaggaggaggaagattacagactgcagggatgagcaaataccatttcccaggatttcctgaagtttttctcccctcccaaagcccaaatctgcctctttctggggcccagcgaggaccctggaagacagagatcctagaaaaagcagagggaaaagaagaggaagagaacatggggaaaccgccagggaacagaactcttggtccaggaggcgcaaaccacaagtgcaattagtcaaaaaaaaaccctgaaattaaaaaatgattccaagctgaggaggggagtacataagttactgcagccccaagacatttatgaataatacaaatgctgtgaggtgctgagcctgagcacagttaattaatatgtacaggagcagagatgcacttgaaaaacaatagtgctgtttccccctcgccagaagtaaaaatattt

SEQ ID NO: 5068 - DNA, 233 bp, Homo sapiens
gcgtgcctgggtcccactacagacctatgatgacatccgtcacagaaccaggaaagatgcagaaccaagaaagatgcagagccaggagggagcctacaggagcagagatgtctcagccttcctatctcccgctggatcctgcatctcagatcgtgtgtagattgaacagttgaggcctgccactaatctcttgaatccttattaaaaggtcaactttaaatgtgaaaaaaaag

SEQ ID NO: 5069 - DNA, 520 bp, Homo sapiens
  misc_feature 462: n = A,T,C or G
acacggggtctcactacgctgtcaagactggtctcaactctaggttcctgttaaggacatcaatgcaagtcttggaactcaaagatgccactgaaaaacttagtctgttagtcaaggcgagcttgtcctggattcacatttcgacaagagcaatctcagctacctgtaggaaggcttcataacccagaaagaggtgcctcccaacacctcagttaagactctggacactggggaagcctaggcaagggagaatagatgtgggtgggcctagcacagctacctgggtaccttcagtaaacacaggctcacccctgctatggctgggataggactgagagaagatcagcttcttcaggtggggggggctggccaagacccccacccactcccacctcccaacttacagatgtccctctacaggccattcccagccagctgacccatgatagctctgcttaccgncttcacaaaggataagctatcttcctgtccagcggtacaattctaggaggggaaagag

SEQ ID NO: 5070 - DNA, 309 bp, Homo sapiens
tcctgagctgacatgtaagaaatatgactgctctgctggaaagaccacatggagaagctctgagactaagggagagagagaggcactcagctgggtccagcctgcttgccacccccaccaagatgccagacatgtgggtaaagttgtcctgtaacatccagaccagcccagccctcaagtgaataccaccaggtgacactgatcaatcccatgtggagcagactttcccagcaagtcctgcctaatttcctgacccaaacaattgtgagatatgataaaaaaaaatggtcactgttttaaaaaaaaaaa

SEQ ID NO: 5071 - DNA, 434 bp, Homo sapiens
  misc_feature 16, 23, 43, 44, 47, 48, 49, 57, 66, 78, 80, 284, 309, 378: n = A,T,C or G
atccacactggcgacnggctaancagtcaaggccaccctgcanntgnnnagaggctncctactttntgatgccttcgnancttcactcaggaccatcaaagatacaactcttagactttatgggggcaggaaatctcgacctcagaaacctcagagactttgagggtctcccaccatggaccatgtatcaagtggaactaaaattttcccttagggcagttccacacactctgaaggtccaacgtgtctgtcagttacctggtgggtctacccacctccctctntaaccctgccccagggttgaagtanagctgcacctgatttaaagttttcacagctaccctgagcacccacagacctcctgcaaggttgaagganatgaccttctgacttaatcatgtcactgtagtccttccacagtaaatagaggaatc

SEQ ID NO: 5072 - DNA, 267 bp, Homo sapiens
ctcccgacctcgatcaagcctcgaccctcaggaccgccagctgcttctccaactcccggtcccggtgtcgcccagccacctcctggctctgccgttctgcctgcagttccttaagctcctcctgtgtccggagcagctcctggaaggaaacgggaatggtgatggggcacccagagccagactaagatacctgaatgtggagaagctgaaactctcatacactgccaggggaataaaaactgatgtggccactttgaaaaaaaaaaa

SEQ ID NO: 5073 - DNA, 274 bp, Homo sapiens
aaagccaaaaagactagatgaggaaataccatcattgtgtggaatattctggattgggagtggagtgctcagctaccctgcaccagatcacttcaatattcccctctcttaatcgctaatgaaagaaacagcagctttgactgatgactcaacaataagtctgctggggccacactgaagcacaatacccaagggctcccgggagtgccatgcaaatcgggcacgtttccacactttgcaatggaagagaaatatggttcttttaagatctcca

SEQ ID NO: 5074 - DNA, 202 bp, Homo sapiens
  misc_feature 22, 39, 120, 127, 128: n = A,T,C or G
ggggtggacctcacgctacttncattcatggcggaaggngaaagggagctgccaggaagaaaaagcaaattgcaaaaggagagcctgtcatacccacttctttgagaaggctctctcccnaaatgtnnagattaaacaacaactaaagatggcgaatcatagaaggagacttgtgcactatctagaaatgaaatcaatactc

SEQ ID NO: 5075 - DNA, 136 bp, Homo sapiens
  misc_feature 29, 38, 40, 42, 45, 53, 114: n = A,T,C or G
ggaacccttgtcatccaggaatttcccanagagatggntntngcngaacaccntttctcaacaagaaaaatctgttggaagaaggtgccctgtgatctggcctattttgggaanactccatccatctttttgggaa

SEQ ID NO: 5076 - DNA, 272 bp, Homo sapiens
atgcatgagaagaagcacccccttttctcctgttctcctttgctgaatcaagtcatatcttcacatattgtctggaattgctacagctattttgaaacccaaagtgaaagcatcatcaacctgctgaggatagcaaggcagaaagacaaattcatcggtggacctggatctgtgatgacttcatcaaggctctgagccaatcgtggaccacctggcctccagacatcatcttatgtgaaatgatggctgtccttattgtgtaagctgggctg

SEQ ID NO: 5077 - DNA, 242 bp, Homo sapiens
tgatgttggagaggctgcaggtgaggaagtgaagcaggaagaggaaaaagatgaggaagatgaaatcatggttcctggtgggcagagatgccagcgtatacttagaccctccctcaagtgctcatccacagatgctgtccctcctgaccatgagacctgaagtgtctcagcagcgtcaccatgcttggttttattcatccacactcagctgaagtaaagagggggcctgcagagatctatag

SEQ ID NO: 5078 - DNA, 267 bp, Homo sapiens
  misc_feature 32, 167, 171, 172, 173, 177, 180, 181, 185, 188, 190, 198: n = A,T,C or G
acttgtttgccatgtctcccactggaatatcntctgcatgagagcaggcactctagctgccttggctatgctggatccctacagattcccacagtgatcaggacccaggattatgtgagattgacatgaaataatttctgaaatagcacactttatgctgattactntatnnncaanttnnttgncananaagtagtnggataacactgacattatttttaaaaggcaatatgctttatgaaatgtatcttaataataaaagatcct

SEQ ID NO: 5079 - DNA, 197 bp, Homo sapiens
  misc_feature 23, 26, 45, 54, 68, 123, 124, 140, 141, 167, 168: n = A,T,C or G
tatctactactatcgtaatatcnctncttccttacttaggggggngggatcacntttctctttggaangccgtctgaggggggctacatgcttttaagtccagcaactgtagcataccatggnncaagtcaggaactcgnnaccattcatttgcggattcaaaccannatggggggtccagcggggtcttggccttt

SEQ ID NO: 5080 - DNA, 137 bp, Homo sapiens
  misc_feature 16, 46, 62, 89, 118: n = A,T,C or G
actctgctcaactaanaacattacacgggggggggtgggggtgagngactacctcttccatncaactcctattttccctatactagaanttaactacaccgtattactaaaattaatnacacctgtaaaaaaaaaaa

SEQ ID NO: 5081 - DNA, 221 bp, Homo sapiens
cagagcctgagaagcagagtggagagcgcccagtccacgaggacccggcccagaccgagatgctccaagtgcaccatacatgcaggtctcaaggactctgcacaacaagagcatgagacggctcacttttctactgactacgtgtccaggaagtcgtattttgggtatactgagttaactacacgtattactaaaattaatgacacctgtaaaaaaaaaaa

SEQ ID NO: 5082 - DNA, 326 bp, Homo sapiens
agacccatgttaaatctcctggtcagaagatcattccacccaaccctgaatggattaaagttgacagggcccaaccagggtagtggtccaggacactccatcagccattaagtaagtggatccatccatgagccaggcccaggcatcttcaggaacctcgtgtaccaaagcccccaggaagcccaagacgccaacatagaccggcatctggggtagccacatcggagtgtgactggccactttttcatgttgctgtggggcaccactaatgctcagtttacttctattgttttcagccacacattttgtagtaacctgttacaaaa

SEQ ID NO: 5083 - DNA, 115 bp, Homo sapiens
  misc_feature 18, 20, 38, 40, 47, 50, 63, 76, 93: n = A,T,C or G
ctttagggtggcttcatngngttgtaaggccggggggngngcctccnttntttaagcccttancatcccctacctnttctcctaccttctccntaccctaaaatataactcctcc

SEQ ID NO: 5084 - DNA, 198 bp, Homo sapiens
  misc_feature 17, 34, 46, 54, 63, 65, 72, 82, 97, 104, 111, 117, 121, 142,150, 152, 180: n = A,T,C or G
cttctctcctacttctnctcccctttttctctcntctctttttccntttctagnttagggggngncgggganttttttaggncagagtttttgaagnctccttnttttaanaacccntttncactccccttcccttttttcnttccctcntntcttttctctccctctctttttcctttnttcttctttctcttctct

SEQ ID NO: 5085 - DNA, 235 bp, Homo sapiens
  misc_feature 17, 21, 40, 51, 68, 70, 75, 84, 115, 117, 123, 124, 136,172, 184, 187, 189, 190, 198, 204, 209, 215: n = A,T,C or G
ttcttcaaacatctttnatcnaacaaaacctccttcatcntcactcttacntcacattattttccttnantaatnctttcttcnactcactacattcctttcttctactcaatcncnttcccnntctaccttcttnccttttcttctattccacaacctccctttctttcanacacttcccctntcnannttcacctncccccntccantttacnttctacctttctttaccttc

SEQ ID NO: 5086 - DNA, 390 bp, Homo sapiens
  misc_feature 25, 39, 64, 68, 81, 103, 128, 134, 136, 152, 159, 163, 165,175, 176, 243, 266, 269, 284, 288, 297, 306, 308, 310, 315,318, 329, 334, 339, 343, 348, 350, 351, 352, 361, 363: n = A,T,C or G
ccttttttttttaactttttccttntctcccttattttntcccttttttccttcttccttctcnatcnccaccccctttanaatccccccaatttttccctcnccctcccccattttttcccccttcncttttnancttctaccttcctccnttttttntatnanttcttattanntttcttttctcccttcaaaccaattttctcccctttttttttccacccccctctttttattaacccncctttttttttttttctttcccnacnaatcccccccccccnttcntatttattncccaccccncncnttctnttnctcttttccanatatntctcnattnttttncnnnccctatttncnttttctttttccccattttccccccct

SEQ ID NO: 5087 - DNA, 543 bp, Homo sapiens
  misc_feature 17, 320, 368, 372, 395, 401, 415, 418, 429, 467, 468, 472,485, 495, 507: n = A,T,C or G
gtggggtctttcacttncattggaaccaccgaagaaaggatccacgctggcctgctgcagacagacagccccgccaacaaccagcaccaagcaccagccacgcaagaaaggccatcccaggccatcccaggccatccagccccagccaagccgaagccatgtgagtgacgccggcatgaccagcaggagcactgaggagctgagcccaaggatgatccgtcaggctaaggtgttctccccggctaggccacagcccccaggtactcaggcaaacgcaaatccagtcgctgctgtgacttggggtgaaggagcttaccccnaataatctgggtgggtctgatcaattcattgaaaagaagcaactccgnctgnggaccgtagcgccagctcctgtntgagtngccccggctgcctntgnggaaagcttgntctgcagtttgggactcgtcttaccagaccccaccatnncatnagccagtggcttnagtaaatctntttggatgctgnttgaaatctttcttttttaaaaaaaggggcccgggg

SEQ ID NO: 5088 - DNA, 193 bp, Homo sapiens
acaggctgcatggagattgtagcatgaatgcagatattggaaatttactggatgtatgatcagacaaaccaattgaagtggagaagagaaccaatcagccaaatcattacagaagctgcaccactgcctgaaatatcttgactgattctatataagttgaatttttgccgaataaattctgaaaataaaaaaa

SEQ ID NO: 5089 - DNA, 159 bp, Homo sapiens
cagaaacttttggatttggtggacatgaagatcattggtgaccaatgtggagagctccttcagtggaatggttaatcctgagccagatgacctgaattcaggaatgaacaggagatgaagacatggagaatcagaggaaggacttctcaaggatacagt

SEQ ID NO: 5090 - DNA, 186 bp, Homo sapiens
  misc_feature 29: n = A,T,C or G
gctccaggtcagcctggcagtgatgattntgggtacaccatattccaaaccaatgactgggacactgaggcctgcagaagaccccgttgtccctaccagcacctcggacaccagattggacctaggagccatctcccatgactgtacaagtgacaataaatcactcattcttcattcaaaaaaaaa

SEQ ID NO: 5091 - DNA, 185 bp, Homo sapiens
  misc_feature 22, 34, 60, 82, 86, 146: n = A,T,C or G
atggcatactgccacgcctganagcggtctgatngtgccactccaaaggcaacagaaccntgattgacacctagtcaattgngttngatgaaatgaccatgaacggacgaatgattgtatttgaatcccagcttcacaaagaactnttctcatatagcttttctgactaaaagttgctgtttacc

SEQ ID NO: 5092 - DNA, 206 bp, Homo sapiens
gtgtaagtcttggagtttcctgtaggcttggagaggatttccttttggatggtgttcagatggagcagacatgttacttccttatctgctgctgttgttgaagagtggccagctgcatctttgggtttccaagatacagctgaacagccagagaagacctactctcctctaataataaagattgttctctctttcaaaaaaaaaaa

SEQ ID NO: 5093 - DNA, 513 bp, Homo sapiens
  misc_feature 497: n = A,T,C or G
cctcggatggaattgcactcaaggacatgtctgcgtcaaagcttttctccaagttcgtcttcagttgctatttctgaagccacatcacaccctgagaaactcctcccttttcctctaccctgcttctccccccgtctgtctccttcttgtcacttttagttggttttgcacgggaactctgaggccatcccagctgcccttgtctgcccgtgagaatccccttccacagcgcctcaagagcaggatggaagttccaagagtatgaattcatttcatgacatgtaccttttgcaacataccccgtgtccactggagcaagaaggggaggctctcacctctttgctttctgttatgtcttccatcgtccatagggcagtgaccctcatggcttggccacaagaaaagcaggcatcttctctaaactatggaagaaatcatgaggtggggcccccagtcttttggtatgggagatgccaaacaaacaggaaataaagacncaattgcactccttaa

SEQ ID NO: 5094 - DNA, 437 bp, Homo sapiens
tttccacaggtggagtgataactctaatgaggtccacgtcatcatgactcctgtttagagaaataaaatgtttagatctcaactttcctgccattccctagtggtgttataaataagggtgacattgacgcatttcaaattgttcctcgaagagcggcaattcattatcttttaaagaaatttgctccacatcaagtctcaatccaactgacattagcgtgtgttagatacacatacgaatgtatctaacttccattgaaatggaatataagtcctgcagccactttgcaacctgaggatgtatagaacgcctatatgcgataccgtctatatgtgcatatatttgtgtatgcttgagcataaatataaaatatttacaccttatctgtctacagaagattaatttacaaaataaaaagtttccaaatcaaaaaaaa

SEQ ID NO: 5095 - DNA, 412 bp, Homo sapiens
  misc_feature 394: n = A,T,C or G
gaaaaaatacggcgcagaagaaaagcgagcattttggtgtcatacagacctcctactccatgatcatgatgaacaagtgaatcacttcagttctccaagctccactttcaccaaatgtaaaagaagaaaaccattcctacttcgagagtttgtgtggattaaatgagataatgggtacacagatgacacattatattcaaaatggtaacttcccttctaccacttcacaataactcacatgctgtaggcattccaacgcccactctcataagcaaacttcaagtctttttcaaggtattacttcataaagccagacatgttttctgccttgttcacagaagattctcactgcctaaaacagtgtccaccacacactgatcaataaatatctctntgcagccacaagaaaagg

SEQ ID NO: 5096 - DNA, 515 bp, Homo sapiens
  misc_feature 35, 415, 488: n = A,T,C or G
ctatgaatccacactttgtgaagatgcttatggcncactagacaatttgttaaatgactgcagttccttcaaaagaaatacagaattatggggagattcctgagatgtcagtcagttatgaaaaggaagtcacagcagagggtgtggagaggccagaaattgtctcaacttggtcttcggcaggcatttcctggaggagtgaagcatgtcgggagaactgtgagatgcctgactgggagcaaagtgctgaaagcttacaacctgttcaagaggacatggctttaaatgaagtcttgcagaaattaaaacatactaacagaaagcaggaagtgcgaatccaagaactccagtgtagtaacctgtatttagagaagagggttaaagaactacagatgaagattaccaaacagcaagngttcattgatgtcatcaataagctaaaggagaatgttgaagaattaattgaagacaaataccaaatatcctanagaagaatgatccttaaaagacattgg

SEQ ID NO: 5097 - DNA, 547 bp, Homo sapiens
  misc_feature 432, 456, 503, 510, 518, 527: n = A,T,C or G
aatggaatcaatggtctggaagagcacaggagggtaatgtttcccagaagagatgatgttagaaaaaaatgtgctgcccctgcagcttttgatgcactttcttattggtctacaggttgttttctttcttgactgtgatctggaaatgtacaaccagaggatctcaataaatgctccaatgtgtgaccagctaattttattaacatcagttctctatgaaatgatgctgcatttactcggtaacagaatgaagtggcataaatgagaggcggtggacactaacctgtgactgagagagaggagctaccaccgatgaagactggtcatttgggtttcacatttctctgtgaatgaacagttttgaaaaactaagcctcgtgtatctattctcctttaaaagtactgccttcctaaggaaaacaccctcaatgnatccatttttgttcaagtctttgnctggagctggtgctacaactgctttaatgagagacaatttttttttntgtcatncacagtgncttttgcanccctcttttgaattaataaa

SEQ ID NO: 5098 - DNA, 356 bp, Homo sapiens
  misc_feature 92: n = A,T,C or G
taagcagtacaatcaatggatctttgatggctgagacaggttgaaatggcaaaaagacaacagcaccacttttgaaaacgactttatgtagnccacctccctggcctcagcgtcctcatctgaacaagaagggaacttcccagttctgacggtctatcgtacagcatctcagcgttgtgattcttaaataagtattcactgtacaatcctgtaaaggtaagagctaaacaatcagatatcacccccagaacattcttcggaagtctctgtgctctgctttcttactaatataataatagcttgttttcttatgattttcctccttcgaataaaaacaattcctattaaaaaaaaaa

SEQ ID NO: 5099 - DNA, 215 bp, Homo sapiens
  misc_feature 156: n = A,T,C or G
gttgtgatttttgtcctcatggctcaaaatgacagctacaggtgcagccatctcatctccatcccaggcaccaggatgaaggtatagattaaaaaaagggcagaggatacacatcaactgtcatttaaggaagagtcctagaagcagccccatggngctgcctcatgtatctcattggtgaagactgagtcacatggctacatcttgctgcaaga

SEQ ID NO: 5100 - DNA, 564 bp, Homo sapiens
  misc_feature 448, 457, 481, 490, 502, 531, 541, 547: n = A,T,C or G
atattattgtatgtggatcttctccgtgtgctcctctggatcccggctctcctcactctgtgcaggaggctgactttcatggactgtggtattcaggcatccttgcctttcggctgcaggagaccagaggctgagagcagagagagactccagccttgaggggcctcaacttggccatggccctgctccttccaacagcattctggatcatccacatcaaacagaatcgaaagcaaaggatgcagccaagcagacgccacctggaacccattccagtgagggcagcagtagccaccacactcaagttccacaagagccagggctaatcttctggggccagctgggatctggagcagggagagcacttaggttgtcactgactgcagtgtcagaacctgcaagtgaagggttaggtgctctccctggacttggcaagttcttgcaaagngatttttgnagggggtctttactggggggcctncaagccagncctctggccctntaaaaaattctgaaggttctcaaaatccntttaataaancttaantcacctaaaaaaaaaaa

SEQ ID NO: 5101 - DNA, 365 bp, Homo sapiens
  misc_feature 100, 136, 140, 143, 149, 154, 303, 320, 343: n = A,T,C or G
accagtaggcgaggatgccgctgtggtgctacctgaaactccagaggacagacctgatgttccggtctctgtgggaggaggagtggtgtgctggggtcanacagcatctgctccaagtaggagacaggcaactgcnccanttnctcccntcttnaaccgtcccagcagcagagagtgtccactgcagacagcaacgcacccttctctacctccaccttagggaggggtcctgcctcaggaaggaatgccaggtgcagagaggcatactccgacggtgacttcaacttgtgccaaagttaaacncattaaagtggcctccngaggtaattgccctcacaaaaanaaatggaattactttctctgtt

SEQ ID NO: 5102 - DNA, 266 bp, Homo sapiens
ataaataggaaaccctgccatgttgaaaggaatacaacccaacatggagtagaaacaagaaatcaagatatacactctaggacaaggagcaataagaatttgacttaaaatggttatttagcatgtattagagttgcaactggattttatgtagttatgagggaaccctgaaaaaagtaccattgaacagaaatgagatttggtttcagaacttcagcccaaatgctattaaatcttttgcatttcttgaactattaaaaaaaaaa

SEQ ID NO: 5103 - DNA, 344 bp, Homo sapiens
  misc_feature 30, 41, 173, 217, 234, 242, 247, 259, 262, 323: n = A,T,C or G
gcacttgcacaccactgtcgctggagcagntatgaattggnacaaccttatctggacagaaatgctttcatatgcataaagaaccttgaagattgcttctgagcctctgaactgtcttctgtgttctggaattcacattaaggaaacacactccaggacactgaaagcaaggnggcagtaaagaatgcggactctggggtcattatgactggggctntctctcactcctcatgngacctcanagaanctactcaacttnctnctctcagtctcctctcttgtaagatggggataatactaacatccaccacggaggtgttacnaaggataatacaacttcttta

SEQ ID NO: 5104 - DNA, 116 bp, Homo sapiens
ctcaactgggcagttctcaattgtggtctctcctgtggaagtatgccatgaaaagaaagtgaaagttgtaagactcttgatgcaaatggcaacatgtgcacacccaaaaaaaaaaa

SEQ ID NO: 5105 - DNA, 348 bp, Homo sapiens
  misc_feature 42, 71, 72, 73, 77, 79, 82, 94, 110, 148, 152, 157, 183,258, 299: n = A,T,C or G
gggacgtcagccaactttttgggcatatccggcgacgtgacnccttaaagggggggggggggccattggtnnnaggncncancaaaggaaccantcatggcacaattggngtggccaatacccagtccccgggaccaaactgggtcanccgncttanccattgggagtgaagatggactatgntgataagagaagatctggaatacatctgaaagtgtccttagttgtaaggcttaaaagaatcagttatggaccttncagctggtggccccaagattatagtcccttttgatggatangaatccctattaaaagggaatacttagctggtttatttaaaaaaaaaaa

SEQ ID NO: 5106 - DNA, 104 bp, Homo sapiens
  misc_feature 25, 50, 58, 59, 75, 77, 80: n = A,T,C or G
ctactttgtttaacgagaagggccngatgaatcccctaaaactgtatttngataactnnattgcccatgaaaatngnttncctctggatctattactttgaata

SEQ ID NO: 5107 - DNA, 354 bp, Homo sapiens
cattcccttcacatggccgcccaccatgctgaactgatggattattgcaagtcctggtcctggtttggttgccgcgtccacagctccttgtgcattcttcccaaagactccattccgaccagctaccatccactatacaaaggtgaaccattacaccatcagggcttcccaccattggctggaaggggctggttgcacagacgactcctcttttggatgccttttccacaggtgacactgcaggctctccatgcagaccactgggaaaatccaccatgaactgcaaataaaacattgtactttgtctaagcttttgcaaataaaacattgtaaaggagatttcaaaaaaaaaaa

SEQ ID NO: 5108 - DNA, 634 bp, Homo sapiens
  misc_feature 27, 40, 51, 54, 57, 64, 79, 81, 97, 112, 157, 161, 216, 243,258, 263, 268, 282, 314, 337, 374, 381, 385, 395, 397, 462,520, 525, 532, 537, 561, 565, 573, 587, 600, 605, 609, 615: n = A,T,C or G
aaaaccttgggaaggggacttggggcnaccgggaaatggnaaaaatgggtnggnaantgggggncttgggggaaaaccntncaaaagggcccaaggnctcccaccaagggtnggggggaattccaatttaaaaggggggggaaccgggggtgggttncttnttgggcctttatttgggttttgggtcccccaaaagggcccttggggttcccttcnaaaaaaaccttgggggcccccttgggnaaaattccaaaaatnggccnttttncccaaaccccttcnaagcctttggcccccaaggaaaggggaaaaanccccgggggggaaattttaaccnaggggcccctttggaaagcccccaactttgggcaaangcccccnaggncccaagggtntnggggttaatttttttaaaatgggtaaaaaaattttcttttaaagttaaaaaacaaaaccttcaangggaagccttcttcttttgggtccccttttttttaaaaaaaaatcccaattttttcanaaacntttttcnggctntaaaaatccggggaaagggggttntttnttttccangggggccaaaaccnttgggaaaattcnttggnggcntccctnggggaaaatggccaaaatt

SEQ ID NO: 5109 - DNA, 519 bp, Homo sapiens
  misc_feature 487: n = A,T,C or G
cactggataaatacagaacaagataacaagagttcccagcaaaggatccagcttgaaataacacggtgctaagcatggatttttccaccgaatgaggaaattctaattctaattgttagtctctttatcaatgacgccaagtggcaaggaacatcaccatctttggagacctagtggtggagttaaactactacagggaaacaactttacgtatagaggagttgagcttcctagaggaaaagaaggaaaatcattcctaatggaagatcaactattcaagaaagaaagaagagcaatgagaaaggtagtctaattattcagaggactgtgtgatatttgtgacattgccagatggagcacgttcaaggagaaagacaactatgcagccacaagaaacccacactatcaccttgtgcttgaggaaatggtgttttatcatcacgttgttaatcgattgacaatacaattacttcagttcatttatgcnggaataaatgtaattacccgataaaaaaaaaa

SEQ ID NO: 5110 - DNA, 404 bp, Homo sapiens
agaactgagaggtgttcttttccgggccaccttaccctcccgcactccccagttctacctttccaaggcaggggaaggtgcatcctcgccaggctcctgcccgcgccttccgagtacccctggcccgcagccggtgacacggcgcgcggaacatccgtgaacgagttgggttacatctctgtccccgcgaagctgcagatcgctgaccgccccgcgcacccccgcctgcctgcacactgtcaaccgcacttaggggaaatttttggaacagaagctccgcccatcctgctcccactgcctccactaaccgactcaaaacccccacctcgggccgccgaagcaggtttcgtcacacgatctgggggactgtattttttacaagaaaacaagcatcaaaaaaaaaa

SEQ ID NO: 5111 - DNA, 515 bp, Homo sapiens
  misc_feature 23, 43, 87, 91, 94, 114, 116, 131, 139, 200, 210, 243, 253,347, 422, 485: n = A,T,C or G
gaaaactttggaaagaaaacaangttttttttggccccaccanttttggccccccaaggggaaattggggccccttttggaaaaacnttcnttnggggggcccttccaaaaagntnggaaacccccaaccnttggcccnttttggggccccccccccttaaaaaaccttggccttggggaaaaatttaaccaaggggggntccttcaacnttcggcccggaaagggtttggggaaagttggcnaagtggggcnacccggggggccccttaagccccttggaataaaattggccttttcttaaaataattttttttttttttttttaaaaaacttggaaaaaaaattncccttttaaaggggggaaaaaaaaccccaaccttgggaagccttcttccccttgggggtgggaaaaaattaaagnaacttttccttaaccttttgggaacctttttggcccccaaagggaatgggaaccaaccaaggnaaaaaaaggcctttgggaaaaaaaaccaaa

SEQ ID NO: 5112 - DNA, 329 bp, Homo sapiens
  misc_feature 29, 36, 57, 65, 82, 96, 113, 116, 119, 126, 145, 150, 162,163, 196, 200, 212, 217, 230, 232, 246, 249, 253, 279, 290,292, 308: n = A,T,C or G
gaaaaccttgggaaagaaattggaagccnacccccnttggcccccaggggaaacttnggcccccncccccggggcccccttnggcttttttttttntggaacctttaaagaantcnttnggaatanccccgaaaacccaagaaanccaanggtttttaaaanngggcctttggtttctttaaaaggtgggggaacnaaangggcttctttcnacaangggaaccccggantngccaaagaaacttnccntggnaaaaaaccaaggaacttaaccttctnttttggccctntntttttggcttggcaangtttggggaagaaaagaaaaa

SEQ ID NO: 5113 - DNA, 451 bp, Homo sapiens
  misc_feature 21, 45, 48, 59, 109, 161: n = A,T,C or G
tgcagagaaccaacattagcnattggcagcaatctcctgtgtggntgnagcctagcaantaacaaggagcttccctacacattgtatcacaatgaccttgccaggtctntcctgcctactgccggccctacccacaagatgtgaacttcagagccttcttncaactgcttcttggctatttgcaccctctaaccctctggaagaagaatgaggactattatgaaggcaaaagcataaaaggggaaaagattagcctccagagtaggaagattgggttgttggaagccagcacaagccttcccctgaaagagttaattcgcctccaatggacgtagggactgacctgggagtggcctcagcctacataggacaggcctaaaggccccattggggctgaaggtgacactgggtcagatccctaggattctgcaacttgaggtgggagtgtcta

SEQ ID NO: 5114 - DNA, 285 bp, Homo sapiens
  misc_feature 19, 20, 30, 31, 32, 48, 70, 85, 108, 133, 144, 149, 181,191, 200, 223, 226, 229, 246, 247, 250, 264: n = A,T,C or G
gtctccatttgtctcccannctgaagtgcnnngatccaccccactgtnatctcaaactcctgggctcaancaacgttcctaccancctcccaaagcactgggattatnggcatgagctacctgatgcctatantcaggactggnctganccttttaatcattatgtccctttctgtcccangtttttacanttaactggnaattatattggactttggacttnttntanatcaagtagaaaatgannganggctttttgctgtntgctaattctgacttaggctt

SEQ ID NO: 5115 - DNA, 512 bp, Homo sapiens
  misc_feature 121: n = A,T,C or G
gatcacttaagaaaaagaagccttgtgctattaaagaagaataaggaggaggaagaggaggagacggaagagaggagaagagaggagcaggggaaaagcatacggacagaagaacacacanaagactgagagttgattctgatggcattttctttcttaggtagttttttctaagctccagactcattatcatccttgttttctacaagccacactaatatcatcttaataaattattttattttttgctgaaaaacatcttgagtccttttctgtaacttgtgatgaattaattcctaaataacgtaggtcacatgtgctaataactattgttgtatttgttgtgcacttcaggcagtttacataaatgatggaatattaggtctgaacatttattcaagccaaccatctgggacaatcagtaccctagtcagacatacccacttcaggagtgttcatctattaatgaatcacaaaggccactcttggggagataactgcaagtctttcag

SEQ ID NO: 5116 - DNA, 521 bp, Homo sapiens
  misc_feature 498: n = A,T,C or G
gaggcagggatgcagaactatttcttctccacttctgatgttttcttcatcttggagggagcccaatcagaataacacacctggcctttctccaccccttattcactccactccagggaaaatggagtggcttagactcgtgtatttgggagccttactttgggagagacctgcccacagagaatacaccttcccctctgcacccacccccatacctgaatcttacaggagcagctgccactcactccaccacatgagagcatccacactcatcccacagtgcccatgacatgctatagaaacaggaaagaaaaatcacggggacccatgagtaagctaagaagtcatggaaacggtaagacaaccaaaaggacaaggtggcactgctggcctcactgacaatcagatggaagatgagcttggtgagccagccctggcaggcatgtggacccagtaaccaagtagatggaacattttgccaggtgtttcacagtgatngattaactgaatgtcttggtttt

SEQ ID NO: 5117 - DNA, 282 bp, Homo sapiens
agtctcagatccatttgagcaggtcctgtctctgaagtccagggctctgcctccagctcctaggaaagtacccggcacaaagaagaggctccataactattttttaattgcattgaaatgaagatttgggatttgcttgaatggagtcagcaaatgccatcatcagaggatgctatttcagaagagaaaaatagaaaggaggtgtgctcctaagggctcctgccttggagagtaactcacaaggccagcccagattcaagatggaaaggggggggaaaggaa

SEQ ID NO: 5118 - DNA, 529 bp, Homo sapiens
  misc_feature 85, 117, 132, 177, 210, 221, 225, 275, 285, 418, 423, 439,440, 448, 504: n = A,T,C or G
gactcaaaccccaggatcaagcactaagaaaacagccagagagagacttttccaatcacctcccacaactggagtgaagaatcangatacagtggacaaaataagacatgaagtgtnaggatgttgtttcangctgcacacgtgtcccagagaagaagaaaccaagcatcgtgatanaactctgttgagccaggcaaagtatgaatgggntgatcttcctncatnatggaaagaaacttatactgattcatcaagaagcagggatagaagcctgnttatattgtnatttattttagagactataaaagtgactaaccaaaagaaccaaaacagggatggttgggaaaaacgtggttatctttgggcagtgaggccaccttgactggaagactgcccaagagtgaaggtgacaaaggancctanatcaggagaccaagannagaggacnatccagatccaacaatatcgctagagtcccttggtcaagctgaatatggaaatgancttttccctatgtaagcccaataaa

SEQ ID NO: 5119 - DNA, 225 bp, Homo sapiens
ggtgccccagaccatcatcatgaccttgctatgacccagcaacctgcctgataacacaggtaccaggtttttgaatccctcagcaactgaagcaaacagccaaagccacacgcatccagcagaaaccatccccccagttctatggaagacttgcgtccttggtataagaaaacaatcttttctgagattttaagaaatatatttaatcatgtgtaaaaaaaaaaa

SEQ ID NO: 5120 - DNA, 192 bp, Homo sapiens
gtttcccacctccactgcttaaggtttaacttaacaactgaccttcgactgtaaaatgaagcaaagtatctgcactcaagtagtgaaaacctaagaagtactattctgcgcaacttccacaagagggcagtagaaccctctgaagtagtccacaaaaataacagaccttgatttttcctctaaaaaaaaaaa

SEQ ID NO: 5121 - DNA, 485 bp, Homo sapiens
cttttctcggagttgaaagtgataacacaccaccacacggtcaagtgaatcataacctgctggggcttgaggtatggaagacgaacagtggaggaaaaggtatcttccagcctggtgaaatgccgtggaaatgtgaggccatttattttttctaaatgccccagcaacagctctcattcacttgcagaagcaagagctgttctgactactcacagtatatggtgagatctttatttctttgcctttttttttactgtgagtttccttttttgtcatcattgaccttataatgaatcactgcactgagtaatgaggctgcagtagataaggtctcctgagaatatgaaggaagaagtatgttcagcaactgattactgacttatccacctgattatagtgaccaatctactcatatatctgatttcaaatgcccaatacaatgttaataatcttattaaaacttctttgcagtaaaaatcaaaaaa

SEQ ID NO: 5122 - DNA, 306 bp, Homo sapiens
gtagatactatccccattttatatgaggacactgaggctcagagaggtcaaataatctgctgtcagcactcttgcctggtaaaagtggcatttgcagcccaagtcccagctctaaccctccatattcaaacgtgcggttccaggacccgagcatcagcaccagaccctgccccactcgcaccttctgaatcagagcctgaattttctcaagatccccagatgatgcatatgttccttcagctttgagaaatggctctaaaccatgctataaagaataaaacctccgagaaaatgcaaaaaaaaaaa

SEQ ID NO: 5123 - DNA, 182 bp, Homo sapiens
tgtgctgcgattattttcataccatcactagtctcctatttctgacctcaaggaaactgctattcttaaaaagaaatatcttcagtgatggagtctcttactcaaaaccatattcctaaacccctactaccagaacacaacgtacaaataaaaaacagtaccatccagtacaaatataaaaa

SEQ ID NO: 5124 - DNA, 315 bp, Homo sapiens
gattatattgaacactcaaggatgtcagcctaacataaaagtgaagatccgcagaataacgaaacagagagaaggaggcattggaataggcttgcatgctgaagggaatgattcatttgaagggagaaacaagtgcagactgaaagacagcaattgctgaagcaatatacacaagtaagctggaaaggatgcaatctaacgcagtggagaagggttggcttccgctgaagagttcatctgtgataagaggagagagaacgaagcatgtgcttagcaataaaggttacatatatttgggatttgtaaaaaaaaaaa

SEQ ID NO: 5125 - DNA, 132 bp, Homo sapiens
  misc_feature 16, 41, 46, 50, 54, 59, 61, 79, 80, 85, 94, 97, 102: n = A,T,C or G
gctgctctggatgggntgagagatgcaatttctctccctgnccttncttncaanctgantnaaacctgaaccctgcttnngtctnaaatgctgngtnatcangctttctctcccacgacaaggcctctgaat

SEQ ID NO: 5126 - DNA, 141 bp, Homo sapiens
tcagaaactgaggtcacgatcaagcaaaaacttcctatttgcaaggagaggctgccttagcctcgagaggaggacatgtaaattactgaccttgaagacactgcactaccctgcggcactgcagacctttaaaaaaaaaaa

SEQ ID NO: 5127 - DNA, 332 bp, Homo sapiens
  misc_feature 306: n = A,T,C or G
tggatggaaacgcaggacccaatcaaaggctctatggctttggataacacagcaactagacagaaggaaacttggtacctgaatggctgtgtggagcaatctctctcactcccctgcccacctctattggactgtgatacaagattggactgtgaacaagaaataaacattatgatgtttaatcctaagatttgagatttgtttattagagcaatcaggctactctgttgtaaattgattgcaaaatttcctccaattatttctcttccatacaatgtgatttagcagtttcttccatcaagtggngggggttattttccatttcctggaga

SEQ ID NO: 5128 - DNA, 172 bp, Homo sapiens
gtgatgtaaaagatgacatgagtctaggagatgctgaagccatcaatgtgaaagaagcctgaatcactgagtcaccatgtggaagagaggcaaaaacaagcctagaataccatcctgaactgttaagtgagcaagaaataaatcctcttgtttttagtgattaaaaaaaaaa

SEQ ID NO: 5129 - DNA, 259 bp, Homo sapiens
ttggatctgctgacctcacatctgaaggacaactctgtatctgcttcagtgatcaaaagcagtccacattttaccctcaatgccatggctggaaaattccctgtagaagccaatcaaatgaagacactctaattttttttccccttcatttctggttagtcttcatttaatgagaactcttatcattcaagtcaaaaatgaaatttatttaattcagtggaaatacattaaaaacaggaaaaagctttaaaaaaaaaaa

SEQ ID NO: 5130 - DNA, 171 bp, Homo sapiens
  misc_feature 24, 51, 58, 74, 89, 100, 110, 123, 127, 133, 137, 149: n = A,T,C or G
gggcccatggtggtttcaaatttntgggaccaaaaatccaaccaaaacccnccagtanagtggaaagccaaaangggaaaaaagccctnggggccctggnaaaaaccctnggggcttttcccntttncttggncatnaacacaaaagcntattttcaagccaagccccaaa

SEQ ID NO: 5131 - DNA, 114 bp, Homo sapiens
  misc_feature 29, 35, 52, 56, 71, 83, 93: n = A,T,C or G
actggagcagaccttattatcacttgaantccacntggaggatactgaaaanactnaaatttttgatgtgncatccaagttcngtgtttatantggttcacctgtttgaagggg

SEQ ID NO: 5132 - DNA, 343 bp, Homo sapiens
gaaaattaaggcctgcaaagattgagtgaaaatttcagtgtcccactgctcatatgcctgaagttcattcgaatacaagcaatctggatccagagcccttgctgttaagcatgacatagactttttccagaaacttttgatgttttctcctacatagctcctttctgcattctggtcagtgtttcactttttagtcagttgccttacaagactcatgccatggacacaatctccacttgaggacattaactttactcttttatcatcacttggccaggcaagtgtacttaggaaaaagcatctaggcttgagaataaaaattttaatattgcaaaaaaaaaaa

SEQ ID NO: 5133 - DNA, 175 bp, Homo sapiens
tgactgtcttgacttttggatcagaaaacttcatcctggaacctccccattactctgaaataaagaacattttcatcagaacttgggaagtgcagcatctagccaagatctccaaacaaacaccattttctgattgaaagaaataaagcaaatgcttcccagagcaaaaaaaaaa

SEQ ID NO: 5134 - DNA, 240 bp, Homo sapiens
  misc_feature 18, 20, 23, 42, 45, 96, 105, 111, 112, 125, 129, 132, 143,165, 166, 193, 211: n = A,T,C or G
ctttatacattggcactntnggntattgaagcgggatgtggnganctctctctgccagctatctggcagacaacttgggtgtgctgacgcgaatgncatcacttntatcannggagggggactantcanganaagcccacaanagattcatatgcacattaaagnngggagaagtcccatactcatatactancataaacagagtatcctnaaactcataacaaagaaacctacaaaaca

SEQ ID NO: 5135 - DNA, 315 bp, Homo sapiens
  misc_feature 163: n = A,T,C or G
ggaagctgtttttccctctttggggtctcagagagattggtggcaaggactcctgggaagagaaaagctgaaggacactctggcaagaggaaaccccgagccaaacgtatggccacctctgaccactcgaccagcccagcatggtgtacgtttctgggtagcntatcacgccttccaagcattgcctttatcttccttctccccatcaagcctgtattgttttccttttgaatcataagcacttttgttaaatacctcaaatctttcgagaacagcaaggagcaaaataaacttaacttctctgaaaaaaaaaaa

SEQ ID NO: 5136 - DNA, 248 bp, Homo sapiens
atcctcaaagggtgcctgcattatcttccccaacccaggactgaccccgaggctccaaatcacctgccttcctccaagcaaacttccgtctcccagctgacctcggctaggcatacggagcaatacactaacacaccatcgctaagcctccctttcaactcttctaagtttttggatttttcaaagagaaaacatgttatcttcccctacccttactccccaaaggaacttaaggcaaaaaaagaaaa

SEQ ID NO: 5137 - DNA, 185 bp, Homo sapiens
  misc_feature 17, 30, 68, 70, 80, 89, 102, 117, 120, 127, 128, 129, 132,135, 136, 149, 164: n = A,T,C or G
ggaccttcccttggccnttttaggtcaggnaaaattgggggggggaaacttgtgttaggggcgggccntnttttttaggnagccccaanaccccaaatggtngaaagggcttttggnganaaaaggnnnccnctnnaaaaaccacccanaaaggaaatttgttngaggattttttaaaaaaacaa

SEQ ID NO: 5138 - DNA, 133 bp, Homo sapiens
  misc_feature 27, 38, 57, 81, 85, 86, 93, 98: n = A,T,C or G
ccaccccaatgcggcggccctttccangataatgtatnacaaccttccaagcatctngctttaaggttgccttgtgcaaangaanncatgganccgcntgccttttgaaccatatgaacttttagctgatacc

SEQ ID NO: 5139 - DNA, 113 bp, Homo sapiens
  misc_feature 16, 46, 65, 94: n = A,T,C or G
tatctccctttgtgtntcttggggattaacctgatgttactctganaaggctctgtatgttgccnagttttgaactctactgacccggaaccanatattttagtctaagacca

SEQ ID NO: 5140 - DNA, 108 bp, Homo sapiens
ctgcataatatttcattgtatggataaactacacagttcccagtgatgaagaccaagattgttcccaatctgtttgctattataaacagtgttgcaacacaaaaaaaa

SEQ ID NO: 5141 - DNA, 272 bp, Homo sapiens
  misc_feature 160, 173, 176: n = A,T,C or G
acttcttaaagctaatttccaactcttcctgcctgcaatgaagagcaagaagtgattaaactgttcaattgcacaatcaactgacaaacaacaatctacatgacaccttcaagaaagggattaatctccacatggcacaaagataccatcaagggatacnacatacatgaagntgncacatctctttaagctcatcttaacagccactattcctcaaaactttctttggctttgatgaccttttcagtttttgagaagtatttgggggggtt

SEQ ID NO: 5142 - DNA, 292 bp, Homo sapiens
ttatatccgaaattcctgaagaatccaaagggcgtgcctcttagcccatgtcagctagacaataatacttctaagacttctacagcagcctcatggggagcccacaataaagaagggctgatctcaaacagcctgagcctggtgtcctaatggaatgagagtctggaggaatcttggaaaaaggtgtgtgttttgcatgtgagaaaaaggcaaattatttgtgactgaagaacagatcattgcagctttaaaaacgtaagccctttttgttggtgagaagtatttggggggg

SEQ ID NO: 5143 - DNA, 431 bp, Homo sapiens
ttggaattctaaggggacagggaaagaatgggtttgggcggaacggtgggcccggggggccccaaggccttaatggccttcccaacccgcccaaagtgggccttggaaacaatctggggcccttggaatttcttgggggccattccttcaatggaaccaattcttggcttcaatccggtcaatccccaagtggcttggaatctttccaaggcctaatgggataagaatcaagggaaggcatcaacttggaggccaggggaagctcttgcccatggaccttggtatcccacgtactccaaactttccatttcctcgcccttgcccccgggaagcccgaagtccttgtattcaagccctttatcctcacaccgcttttctacaaatgggcattcaaataaaaagtgcaccgtgtttcttggtaaaaaaaaaaa

SEQ ID NO: 5144 - DNA, 191 bp, Homo sapiens
  misc_feature 17, 26, 35, 37, 41, 46, 48, 63, 71, 77, 104, 158, 161, 172: n = A,T,C or G
cctgtgccccaggcccnaaattattntactttaanancccntgtananaacttagcatgaggncaacagcntatgtnataaatttattgaaaacgttatttganttattgatcaaaaaggttatatgtgacgggcgaacttgctttccttggtgctcngtngggttaaaagntctttgtttttctaaaaaa

SEQ ID NO: 5145 - DNA, 516 bp, Homo sapiens
  misc_feature 444, 450, 494: n = A,T,C or G
aacttcccacatacaccccttttggctgagctgtatggccataagcgtagagacttgcagctgtatgtggccgtgaatgagagacccagagatggaagcttcacagcatttgtggcagtagcggcagaaatgcatcacacatttgagtccctagatggccttgtggagaaatgtctacctgccaccctggactattaggaagaaatattcttcaaacaaaaccttatgaggaacagaaccatagctcctgaaactgtgtgaaagcaagagaaagagagtcttttgtcaatagtctgtccacacatatccagacccaacccaaagttacaacctgacctccacgatcactttccctcacagggaccgcactatgaggaacacgccaaagttgagaaaggcctaagatcacctgtgccctagagaggtgtacctacttcgcctggngactgnggaccagctctgcaggaagcaatttaccaaatgtctctgcgatncagtgggcagcaattacacctt

SEQ ID NO: 5146 - DNA, 394 bp, Homo sapiens
gtggggtctttcacctgcaaccctgcaagaccgtctgaggaaactgaaactcatcttaagatgatccaccgggaaaagaatggggggaagcattcatccacaagatcaaagtccctggaaatctttgaaaccagcatctcaggaagaaacaaatcacagggcactggtgttaagagaatgctgactgtctggttttgatggggtggtaatgtggggcaggaccactcattctggcctggaacccccttcctgcctcactgtattccaagtgttagcggcctctgcaaagatcttaaaccctattgttcatacctctgaatctcctacagcgtctagcagagctgcagtacaaagtacacactcaataaatatttgatgaatggaaaaaaaaaaa

SEQ ID NO: 5147 - DNA, 126 bp, Homo sapiens
aaagatcaactagcaacgatttacagacaaaaccaccttggtaaaaataccaaaatgtgggagtaatcctgagtcacttgcattatctacagaactgaataaaaatctgcattggaaaaaaaaaaa

SEQ ID NO: 5148 - DNA, 229 bp, Homo sapiens
aaaggtgcagccaggaaaactcattccccaggagataatggatgtcagcccagacctccacgtccatgcaaaaccctttggtctctcagcagaataaagcagcctcggtccaaccataacctgaccatggtgaggagaggcaaaaggcagatgaaacccactatgcctcagcctgggctccaaacacatttttgtttgaagataaaagctacttagagcaaaaaaaaaa

SEQ ID NO: 5149 - DNA, 332 bp, Homo sapiens
  misc_feature 303: n = A,T,C or G
gtaaatgaaacacacaagaaatcatctatgatttatgaacacatagagacagcacaacgtaaagacagactggaagactatgacccaaattcaagatcaagggctgcctggagggaaggaggaaggtccacagtgagtggctaccaagagggattttggctgcagctaaaatgttttacttcttttatgtgagagaatcatgcaaatatgagaaattatcaacctctgttaattctggtggatggttttatattctctgcatttttaattattgaaaagggcatgagtcccaaagcaaatacnattaaaatttccccttggctaaaaaaaaa

SEQ ID NO: 5150 - DNA, 340 bp, Homo sapiens
ttctgtctagaaactcaagtagaacaattcagtagaagtggtgatgccaggcttcttttctcatgactgatctcaagaccctccatccagaaaaggaatggctgcagtaagtggcgactacccgcgtagcacattctccttccaagaacattactgcaagatgcaccaggcgaagcctcagccagagccctaaaatgagctccctccctcgccagggggttcaggcactcccaggacaactcccactctgtggcagatggttggttcccattgcatcaacaaacaaggaaaccaagctgaaagaagaggcacaagttgtttcatctgagactaaaaaaaa

SEQ ID NO: 5151 - DNA, 108 bp, Homo sapiens
  misc_feature 31: n = A,T,C or G
gcagaactcaaaagcttgatggacaatgctncttcatcctttgaatttgctaaagaactcatcaggcacaatctggttgttttccgaggaggtgaaggggctttgcag

SEQ ID NO: 5152 - DNA, 355 bp, Homo sapiens
  misc_feature 131: n = A,T,C or G
gtggtactgtgaaggcaaggagcttgaaaattccccagatattcacatcgtccaggcaggaaatctgcactcactgaccattgcggaagcctttgaagaggacacaggacgctattcctgctttgcttctnacatctatgggacagattcgacttctgctgagatttatatagaaggggtttcttcttctgactcagaaggcgaccctaacaaggaagagatgaatcggtaattctgattttctgtcttatagctttagcatcctcagatcaattaatagctcaaagagaatgattaattggttactagaacttaagaagggtggctccagggtttgaccacaaaaataaataaa

SEQ ID NO: 5153 - DNA, 414 bp, Homo sapiens
  misc_feature 181: n = A,T,C or G
atggcaggtgagaagagaggagaagtggaacttagaattgacaacatcctaggattttactgacatttcagaaactctggagagaacagtttggatcaccaagagtcataaaagtcccagatacccattttcctcgttgtcttctgctgttgactcaagttttgaagtacttataattagngaatatagctcactcagccatttaaatggaaatttgtcataaatgcatcaaattgacattaactgtgatcgttccgtcaattatttgccattccaaaccctcttcatcattgttgctgaaaataatcaaaagttggctagacacacacgatggcaatgtttgtaccgatgaggatgcacatagcctacttcctgctccagtctggcaggatatccttaagagacatctgaaac

SEQ ID NO: 5154 - DNA, 130 bp, Homo sapiens
  misc_feature 16, 42, 46, 66, 110, 114: n = A,T,C or G
ttctgggcctgacccntatggcccctgccatgctggcctgangaanagggtcgaaggaggatgctnaagccgtacggaatggggtagccattgtacagacaaatgcggtnccanaacttctgttttatac

SEQ ID NO: 5155 - DNA, 384 bp, Homo sapiens
  misc_feature 27, 54, 59, 106, 110, 118, 133, 142, 144, 154, 155, 159,160, 162, 168, 171, 172, 175, 218, 220, 223, 248, 284, 320: n = A,T,C or G
gcatcctcatgcagtgtgcaaactcanctgtgcaaggaacacaaaagcatccanagatnaacaagacacaggccctgcttgtcaagacctcatcatctgaaccggngaancaacaganagggggtctcactgngttgcccanantgagaccttnnactnntnacctcnggnnatncttctgccttggcactctcacacatgctgggattcaggcctgnanccnaggcagagagaaacgggaatgctanatcaagttcacagatttgactgttaccgtggactanacattccaattactgatttggaattgtctgaatctnagagtcaccacgggaaactgtcttttacagaagggaaggcctgctaaaatttccttccagtggc

SEQ ID NO: 5156 - DNA, 486 bp, Homo sapiens
  misc_feature 91, 94, 150, 251, 252, 303, 399, 423: n = A,T,C or G
cccccaccctgccataagccattttcagtctcaagatcaattctttttcgtgagaatgagcatacctctttcagcaggataaccacagggncgnggcaaatattgtttcatgggtttccagctttgtttttggagctcaaaggataaagngctcccacaagaaagaataaagagagaggaaagaaggtcctttgttattagcatgactgaaaaagtcaccagaaagcaggagccccaattctccatcttgnnatggccagccaggcacatcctaactgcatctaccagactgctaatcacctnaaaatccaaccccacagcccagcctctggtctcacttttctcctcctgccttcaccttgcttggaaagacacatctgactggctcccaaaatcaanttcactgggagaatgtggcttggnagtgcttttggaatctatgaaatgctctacagaagggagggtatctttgaataaaaagctggt

SEQ ID NO: 5157 - DNA, 387 bp, Homo sapiens
  misc_feature 357: n = A,T,C or G
atcatggtggaagagcggctaatcctgcagcagaagatggtaaaggccctccaggatgagcaggaatcacagagacacgggtttgaagaagagatcatggaatataaggagcaaatcaaacagcacgcccagacaattgtgagcctcgaagagaaactccagaaagtcactcagcaccataaaaaaatagaaggcgagattgcaacattgaaggacaatgacccagccccaaaggaggaaaggccgcaagaccctctggtggctcccatgacagagagcagtgccaaagacatggcgtacgaacatctgattgagtttacaaaagaagtctatcctcaaagaactgacagttttcanagaaaccaacgtttgaatgggaaagatcca

SEQ ID NO: 5158 - DNA, 306 bp, Homo sapiens
gaggtggatactgtgactgaatgaactcctacactctgcacacctgtgaacacccaaagctgaggagaagacctaagacttgggaaaatgtaccctatggtcaaccctccccttccaacggggcagccagcgggaactgtgactacagagcccaatcttcttgtttcctaatgtggtgctgaaatctgcaccatggggtagtgaccccacaaagaagccaggcaattacatatgttggttcatttcattagtttatggaaataaaatgcatacaactgtttgctgataaatcatcccatttagtat

SEQ ID NO: 5159 - DNA, 504 bp, Homo sapiens
  misc_feature 489: n = A,T,C or G
gattgcactgcctgatggattgagattggacattgtggccttgaaaagagtgggagcaggggccagaatccaggcacaaatggccacagtggcatggacataagaggcaacaatggaggaggctccagaaatgaagattcattacaaaagtgtaacaaaggctgctcgccattcaacattaccctgcaaggagggctgatgtgtgaaggaaagctgtccttctagggttgaaaatgttttaagccatagttgatttttgttcagtaggtaagtcaatcttcagcttgttagcaatgtgccacgttcttcctacccaaagaaattcatgcactcaatatataaatcaagatgtctggtgaattaccatagctgcaggtgcctggcaaccaggattagactgatggccactaatctacgggctcctgattccttctaaggatgtaatgtgctgtaaagggcttccatatttctaaacaagtccaaccagangagaaaccttcagtc

SEQ ID NO: 5160 - DNA, 408 bp, Homo sapiens
  misc_feature 95, 96, 98, 101, 108, 112, 113, 115, 116, 117, 168, 172,184, 307: n = A,T,C or G
atgatgaagactgaggggccatcaaggaatgctgagtggtggaatgatgggatcaggacctctgaaacactacaccacgagtaaataaatgcccnngnatnctccagntctnncnnnaatcccgcaccctcttcctgatttgaatggaaactcactcttacacaaggncatnctggaatcccgnaccctctttctgatatgaatggaaactcactcttacacaagggcatcctggaatcccgcaccctcttcctgacttgaatggaaactcactcttacacaagggcatcctggaatcccgcactcncttcctgatttgaatggaaactcactcttacatgagggcacggcttcacctgctttgtctcttctgagggatgctcattctctgcatggcagcatctgtgt

SEQ ID NO: 5161 - DNA, 210 bp, Homo sapiens
  misc_feature 19, 22, 45, 58, 64, 77, 109, 120, 131, 133, 134, 140, 143,169, 170, 190, 194: n = A,T,C or G
cctgctgtcttgatttttncgncagcccctgggccacaatccatnctcaacaaagctnacgggngcgcttcgggttnttttcttttttcttaacaaggcccacattttnaatttcttacntcactggaatncnnataganttnacataaccccaggccccacttatacnnctccactcctatgacactgntggnccaacatggtttgcta

SEQ ID NO: 5162 - DNA, 558 bp, Homo sapiens
  misc_feature 61, 64, 76, 81, 158, 163, 164, 167, 172, 173, 175, 217, 227,262, 350, 352, 422, 424, 479, 535: n = A,T,C or G
actttgaaatgtttcctgagagggaggaagagttcacgaaaagaaacgatagagaaacctncgnatagaaatgggnggganaacacaccacgaggatgaagaaccagaagaaggagagacctagcagagagggcatctaagatggagacctggtgcanggaannttnttaannanacgagaagttgctgcaaaggcagagggacggggagccaccangatacacagnagcacaggaacgcttgaggctggtggaggtccccncccccctccatccccggcacctccctctgtccagcagcagcaacatcgcagcaacatcatccagtccttccaccccccacctcttccntngacggtgggaagaagcctcgctatggggtcagacagactatcaatggcgtgctggacatggctggcctgngntgcttccagcttgtacgaggcaattgtgaaatatttgggaattttacaggcccgngttggtagcttgaaaatggccttggtggggagtattttacaccacaggaattggcnaacactccaaattggggcttttg

SEQ ID NO: 5163 - DNA, 287 bp, Homo sapiens
  misc_feature 261: n = A,T,C or G
aggatagggttcaggaggaggacttgaaaaaagatcgtctcagggttgtgaaagaagatacaatcagcaagcctctgagaaatcacagctgatgactaagtccacagtctgctcataaaatgtagagttatagctcttgctctcaccactgtctctgatgagtctgaagaattgtgaatcactaaaagtctctacttctttaaatgtctagaaagactgttcaaatcacctggaaagcttgcacttttttttttaatctanaagacaataaaaagttgcaacatcct

SEQ ID NO: 5164 - DNA, 332 bp, Homo sapiens
gaagccaggcgaagtgggcaaaaattgctcccaccttccagaagaactttcaaaaagaataagaaggtggattccacaagcacaagcctagaggccgaaagccaagagtggggtttctggggtggactactgctgactggcctcagctcccagagaagacgcagggctccacaccagaacaagtgatgtcagacagccttattttgttctttgatcagttaccggcttgaagattacattcaatgcaacaaactctatggagacctgactgaggcaggccctgaaacagagtcttgctccgtcacccgggctggagtaaatggcatcatctc

SEQ ID NO: 5165 - DNA, 389 bp, Homo sapiens
  misc_feature 317, 350: n = A,T,C or G
aaagagacaggaaaatcctgatttaagcctcagcagcttgtcatgctgtagaaagctgcgtgacgttccatggtgcttgacggaaccatgttttactcatacctcgcaaccacatggttagatcaagcacaacagaaaatctcgctacattatcactacaccaaccactaggccaaagaatgtttatgaccacagtaagagtattactaccgatgatttcctggaaacacaaagaaggggctatatggaaaaggtgcctccaccattcctcagaactgcagaatggaaaaaacagctttcgggaacaacatccaggnaagaagttgaaggtgctacatcaagcaacatgnaaagtgatgactttcttacggtgactcaattccaagtag

SEQ ID NO: 5166 - DNA, 171 bp, Homo sapiens
  misc_feature 44, 82, 89, 93, 97, 103: n = A,T,C or G
aaaagactgatggccagttttggattcagcagtggctataatcnttgtgctacttcttggggggaagattggtagagatatngggattngggngggnaatccnagaagttccattttaaacaccgttaagtttgagacaccaataagatatacaagtccgagaattgcttg

SEQ ID NO: 5167 - DNA, 396 bp, Homo sapiens
atggtgtatactgttagaggacaagaacctgcttctagccatctttgcgtctccaggacctgacttgtgaccattcaataagagtttgatagatggacagactaatgaatagatgaagatgattagaagccaaaatttctgaatcttcctagcacccagaacatggcttaacatcaaggaaatgctcactaaatactgtcataatggaatgaatggaaccgatgcctaattgaaaatcattaggctgtaaaccatttccatgttccaatttcttcgtttatagaacagaaatgatagtgtaaccacctgaaaatccttcaccctagacttccaaaaccacacccacctcatcaaatgaagtctgactctctagaaagaagcaaatgactgaaaaag

SEQ ID NO: 5168 - DNA, 114 bp, Homo sapiens
  misc_feature 23, 24, 31, 52, 54, 68, 88, 94: n = A,T,C or G
gaaactctcacacccagggtttnngtctccnactggaaaatgctacaagttntnctactactgaaaantttttgtaataacaacaggnttttcnttggaacccgcaaaaaaaaa

SEQ ID NO: 5169 - DNA, 373 bp, Homo sapiens
atgagaaaattgaggcttggaaagggctcacactcatatggtttaacatgaagcccagtgaactgtctttcaactacataatgtcctatagcatcctcagaacctcacagtcattggattacaagcacagactcgtactccaactcggtcgccatcttgggtccgctgtcggcgctgccgggggcgaaacgtaagaccggaggcggagcacgggaggcggagatgcaaagcgcgacaacttctgttgcgtcacttccgcgcgagttcaagttagtttctgagattaaccttttcggtgacgcggggagccatattgaaacctggaaacgatgaggctgcacggctcaccgtcttggataatggcaaagatttt

SEQ ID NO: 5170 - DNA, 294 bp, Homo sapiens
atcactgaagagaggatcgtgacttaaacttgccttgaatctctatagtgctgggtacttggggctggatacagagtactcgttacatgaatactttcttattcaaaggtacgaagaattgcataagcatagttctgcttctagaagaaagccacggacttagactcaaagtctaaggcagggccacaaaacatctcaatagaaagaataactaaaccaggattgacttaaaagcttgagagcagaggtcatggctcatcaatctttgcatccttcacagtgcccaacacaatg

SEQ ID NO: 5171 - DNA, 202 bp, Homo sapiens
  misc_feature 68, 97, 137, 148, 155, 169, 172, 181: n = A,T,C or G
tgccttcatatgagaagtacacctaaaaatttgaatggggacctgtgggaagatcctggtgaaactgncgacattgagctcctaaattctgtggatncttctctgccagtagaagcaagccttccaccccatctgangatattgactntgttatnaagcaggagcctgnggnggcctcttntgaggatggtggggaacatgg

SEQ ID NO: 5172 - DNA, 535 bp, Homo sapiens
attcctggagaactgtcaaacttccaaatatttcaaagatgaaagaaaggaggaaggcagactccagtacttccttcccatccacaccctgtggaccaaccctactcagcctccttcatccactgcagactctggcttctgctcttggccttctcttcacccctaggggctttaactgtcataggtgacttcagagtccatgtgacactccatcaaacaaccttacccccaacccccctacccaacattcagttacctagtcccttccaatctaccacctgttgaactagaccagatctccccactttgtaggccctctcccaggtcaggctacccccacctctagtctctttgcctccagcctcatcctctctcacacacactccatcgtctgctgccagagagagccttccataaaacacatctcaccacgaggctcccctgctttaaactccttcagtgacttcccaaaggctacaggataaagtccaactctcagtgctactatacaaagtccttcatgatctgaccttgc

SEQ ID NO: 5173 - DNA, 391 bp, Homo sapiens
gatactgagatttcagaatatggtttgttgctgttgttgctcacctgtgttttctgactttgctgcaggcctttactgtctggagctgtcttccctggagcttctgagccataggcgagaatggtgtctggagatacataggatctacataattgaaaactccccaaatccatctctcatgtgaagtatcgactgcttttgttcctttcactttcttattattttttttccttttctacttacggagactcatttttctaactgaaaatagaaaactttatcagattggaataacagtccctcttgctgtagttttttttccccaaagactggatgaatttgggcctcgtcagaaagccatctgctgtgtacgaacagacctattcagggg

SEQ ID NO: 5174 - DNA, 256 bp, Homo sapiens
  misc_feature 28, 34, 36, 74, 83, 84, 90, 104, 107, 119, 124, 125, 136,137, 138, 158, 180, 185, 202, 205, 211, 234: n = A,T,C or G
catactatgtctgcgaagctctcagggnctgganancaagcctgggatttcccacattaaaaggggatttacangtgattttnnttgggnaatcttaagaatcncantattttaccaanccttnnaattttggacnnncccccgaaggggctttcttnccttttattaccaatttatttngatgngcccaaaccgggagggnaanattttnggcctccaagaattaaaaacaancttggccaggcccggggggccc

SEQ ID NO: 5175 - DNA, 148 bp, Homo sapiens
tatcgtgaacatcagtgcagcagttctggtcacctggatttataaacaccaagaagtagcaacagccagtgtgcaagtcactgacaacccaagtcaccaaaaatcttactgagaacccattagctccttgaattaaagattattttgt

SEQ ID NO: 5176 - DNA, 357 bp, Homo sapiens
ggctgctgtgaagatcagatgagttgattgctggggcgatgcctaataaagaagaaggctcctgcgggcagaaaggaggaggcgatggaatgtgggttgacttgcacccactccggcgccaacataggctcccgcctgctggaaccactcacggcctgaccacaccaagcagcctggaggagcctgcatggcctccctggattttcagaagaggaggcgaggaaacacctggagcagcccagtgggtcctgccaaagacaacgatgggagagtgatgaggataaacagctgtctgtctctggtaatgcaattaggagctaaaatattaaacactttacgacaactgtcttttacaga

SEQ ID NO: 5177 - DNA, 356 bp, Homo sapiens
atagtcatcttttctgcaaaatgaaggactgcacacagtctctgtgtgtctaactctccgaactaggacgtgagaattctcatgagggttctggttgatggccacaaaatggaaaaggcagaagagcttcggattttttttagaaccttcagaccccagagggcatttcacttgaagatgctactcgcctcatcccttcagaagattaacagatggaagactctgagaagtcatctagagatgtctttagaaatttcaagcacgttttgcttaacagttcatgtcacactttgattctaccagaaggcaagggactgagactaggatgactatgattaaaagaagactggagatcc

SEQ ID NO: 5178 - DNA, 361 bp, Homo sapiens
  misc_feature 157, 238, 305: n = A,T,C or G
attgaagaccaccagccgcaatgaattatgctgaactccatggtggttttgtgacagtaacatatgaagaccagaatgagaccacaaagtccacttgaaacttgaagttagatttcgggcttgatttttagcaacatgtatgcctagctggatgcancagtctccagatgtatttgacagatattgtatccctgcttttgcaatccttcagcttgtggtggttattttttttccctanagcatctcaaaattgtaattagattccttgttgttgatggcataaatgggtttcaaaaagggcttgnagccttggttaatttcctaatgaataaaaccaacagcacacgcttaaaaaaaaaaa

SEQ ID NO: 5179 - DNA, 401 bp, Homo sapiens
gattcttcaccaattgaaaactgccacatacaaaaaatggcaagttgagataaggtaactcaaggcggcacctggagaacagaggctgctgaggaaatcatcgcatcatcagctaccagagcctccaagagagcccggcccttctcaccagagaggggatggcagggcctgcctggaccacctccacctcagggaaggaggataggaggggatggagaaaggggaaggttgaggaattgtgacaaaaagagtagaaccaataacatgaaactgtctcagtgaaacacacagaggggctaaaaccccattgttatgtctttaaagtttatttaattaacatgaattctgtcctgtataatttttatagaaaatattcaacaaggaaaaaataaacacctttt

SEQ ID NO: 5180 - DNA, 588 bp, Homo sapiens
  misc_feature 27, 31, 40, 48, 57, 92, 114, 119, 123, 151, 157, 183, 192,206, 214, 232, 244, 257, 271, 287, 333, 373, 379, 408, 440,456, 522, 528, 559, 572: n = A,T,C or G
tggggggagcttaccttgggttttaantccnaaacttgtngtggacantggccaggnaaggatttttattcttcttcccattgtgggggggncttgcaaggcaaagttcattgnagaanaagntttgggggacccaaacttgggcccggtngtacanttgaacccaaaacccgggattgggtnccgtattanttggtgcattgacnggtcccanggaagccttgctgggccntcctccttttgngggcccttgaagnggaacccttgggangaaagaacttcaagtngacaggcccaggaaagaaatggccccacttgccttggttacaagcncacccttgggaagaaactttcattaaaaaggatggtcttnacaagnccttgggggggacaacccttgccccaagnggggggcccccaagcccttacaagggggaacnttgggggccaaaaagnatggatggtttttcaagaatttacaacttcccaagcccttggaagtcaagcaaccccccccttaancaaacncttggccctttgggggaactttaataaaaanaacccgggccggncccccccttgggcccc

SEQ ID NO: 5181 - DNA, 417 bp, Homo sapiens
  misc_feature 54, 65, 146, 153, 183, 236, 249, 272, 311, 331, 359, 396: n = A,T,C or G
gggggggaggctacccttgccttttaaggttcaggaaaacttggaggaccaggnttttttggccnccattttggcccccaggattggggccctttggaaccttctttggggggcttcaaaggtggaacccaccttgggctttgggnccccttnaaaactgggttgggaaattaccagggcccnggggcccaaaatggggattcttaaacttgggccccaatggggaaaaaagcttngggattaagaaangggcaaatggggaaaccctgggncattaaagttccggaagaacaaaaagcaccccaccaggnttcaagaaacaaatactttncccaaggggcaaccctttttttaaaagngggggggcacctggcttcccttttttggcctggtggnttggcttggaaaaagaaaaaa

SEQ ID NO: 5182 - DNA, 472 bp, Homo sapiens
  misc_feature 29, 34, 44, 47, 54, 62, 70, 72, 74, 81, 95, 101, 115, 124,125, 130, 131, 134, 137, 140, 151, 187, 211, 230, 232, 245,259, 264, 276, 279, 297, 351, 359, 385, 386, 394, 417, 431: n = A,T,C or G
ggggctctggggactcctgccttaagtcngactntcgccctacnctnttgaccnagaatganactatttncnanttaagangccaacagatcacnaaaagncctgtgtgcccagncacaaaatnnttttnnctnaanggnagcgcgctctnttatgtgatacctactattcccagcccattttgtangaaagtagaactgatgctggcttntctttgtcttattccaaangntcgggccattgangattttcccttgcnattanaaaggttcgttngangaccttgaaagccttggngaaagggtgccgctctagcaaaaactatcccaaggggaagcctccgttgttgtnaaaaaggntattttctcccacgctccaagcgatnncatagacntaaaaaagctaaaccctgtttgnaaagctttttggtngggcttttgggccgggtcctaagtaaccacttatcattttc

SEQ ID NO: 5183 - DNA, 291 bp, Homo sapiens
  misc_feature 31, 39, 42, 55, 57, 60, 62, 64, 66, 72, 77, 82, 105, 143,149, 150, 167, 171, 195, 202, 211, 214, 216, 229, 231, 247,248: n = A,T,C or G
ggggattatcttggaaaacgggaaaactccngttgctgngangggcccggaaaangnttngntntntgaaantaccnccccnggggattttctgaaaaaaaattngaaaacctttggggggaaattttggaaaaatccctccnaaaccnnggaagctttaaaaaggntggncccagttccctggaacccgggggntttgaanttggggggnaanangttttttttaaangngaaacctatgccaaannggggggggggacccctgggattttaaaaaccccccccccgggg

SEQ ID NO: 5184 - DNA, 171 bp, Homo sapiens
  misc_feature 20, 28, 38, 62, 72, 78, 119, 138: n = A,T,C or G
tgggagcaattgttgcttgngggacaanggacaaaacnatttctcaatcaaattccaacaangcatatttcngggtgnattttttttaaaaccacttacaagcttatttggttaagggnttgccttgcgggaacaccncttgggggccctcttgtccttggatgccttgct

SEQ ID NO: 5185 - DNA, 199 bp, Homo sapiens
  misc_feature 29, 30, 31, 35, 39, 51, 107, 110: n = A,T,C or G
aaaattccccgggatttcctttggggtcnnnccgncacnaacctgtaaatngggggtggggcttgaccaacacaagggaagccaaaaaacctgtattatcatctccnggngaaggggggattcaaaggggaccggcttgaaaccaagacttccccgcttgcttgggtggtggggttgacattggtggaatggcccccag

SEQ ID NO: 5186 - DNA, 237 bp, Homo sapiens
  misc_feature 21, 37, 39, 51, 72, 73, 83, 145, 150, 151, 155, 159, 161,163, 166, 184, 196, 202, 218, 219: n = A,T,C or G
ggaaggttttccatcacccangctggacgggaagtancnctttcttttaantagatgccacctgccttgggnnccttcaagtntggaattacaagggtctcactcgccgaggttggaagtgcaagtggcacccgggtctaagccntgatnnaagngttnanangantacttattttccttttgnaaaagatggggngttttngccatgattggctganngctttatcaaaaaaaaaa

SEQ ID NO: 5187 - DNA, 153 bp, Homo sapiens
  misc_feature 29, 32, 59, 65, 116, 119: n = A,T,C or G
cctaggctggggtggcagtggcaccctcntanctcactggcagcctttgaactgctcancctcangcgatcctcccttcctcagccttctgaatttcctccttggccgggaaccanggnacttagtgggttgccttcagtttaagggaaccag

SEQ ID NO: 5188 - DNA, 359 bp, Homo sapiens
tgacaagaggcctagtggaaatgactgttgggtgtagaaatggtgacgatacttcctactggatgccctgaagattggggaagatggagcatcacccgatgtgctgggccctgagtgaagcactgaagatacagcagtgaacaaggacagatgggattttcagccttcaagatggccatggatgatccctttctcattgtattcatgcacttatatagcccctttccacatcgaattaggttgacctttgtaatcaagagaacattctggaatgatgaagtagtatgcctgaagtgaggtcattagaaacattgtgagttcttgttttctgggggaagccagtggccatgttaggatct

SEQ ID NO: 5189 - DNA, 209 bp, Homo sapiens
  misc_feature 50, 60, 62, 64, 82, 85, 91, 92, 94, 98, 100, 114: n = A,T,C or G
agacactgctagcagtcacctagaggacgctgcatcccagtcctgcatanagtacaatgntncngtggcctgagagaactancangaaacnncnaacncncgtggcttcactgnactttggggcttaagatgaagataaacctcttgcttcatgacaataaagacaaagaagaattttgggaaactgtgtctggggaaacaaagaaaaa

SEQ ID NO: 5190 - DNA, 424 bp, Homo sapiens
gtaattctcttggatattccaggtagtcaaggatgcagatgtccctccctgagccagagacaacctgagtgacagccccaaaccccttccctccaatgatcgaagctttgttttgggatccagctgcttctgcctagctgccttgcccctctggacaagtcctcacccaagaagccctgggactatcacatagagacagcctggtatgccatttcccagatatggccaaactactatggacttcagagacacacctggcttgagattataggattcttgatcttattcctacttgcttcagttattgatgaaaataggctgagcctcataacaaatgttggagaatgcttatgttcacttttatttggttaagaatgaatgaataaatggatgaatgaaaggatacgagtcctattaaagctgt

SEQ ID NO: 5191 - DNA, 204 bp, Homo sapiens
  misc_feature 28, 51, 52, 53, 54, 58, 66, 71, 79, 85, 109, 128, 132, 142,149, 162, 176: n = A,T,C or G
ctcttcacctttccatctcccaaatatncaatctcacttctataaaatctnnnnttanactaatanaaacncccacacntactanatattttcaaaattcatattattntaccatctttcaacacaantttnttcttcattnaccccanatctattcatacnctttctccaactcntaatatcacttcattccttttaacctcc

SEQ ID NO: 5192 - DNA, 228 bp, Homo sapiens
  misc_feature 23, 38, 62, 70, 74, 93, 96, 106, 110, 132, 137, 145, 150,155, 175, 181, 189, 191: n = A,T,C or G
ccctaacgcccagggctatgacncctacctagtgccangctgtctagcgtgcacctcctgcngagcgganaggncctgaaacccatggctggntgnttggactccnacanaccaggattttatcaaggtctntttgnatgaggantaaanccctnatatggctacttctgcccanctatgngacgcagnanagactgctcatcctgccaggcccaagtgtgaacctgc

SEQ ID NO: 5193 - DNA, 361 bp, Homo sapiens
gcccagaaccaagcgcccatggacacccctacacgggcagcaagggctggaaccggcagcctggtggacatccgccctgcagggctctccctcgcagagactgcagaagagggtgtgcagtgctcagcgcggaaggatgttctccctgcttttaaggagccgtgactattttgctcagcgtccctggcgtgcctttctctgtacaaaaaggagacttagaggcttccccatcccattaccacagctgggcggcttcttgcatgagggcaccttgctgaactaagtcaccccaagctaccctaggctccctgtgcactgagatgctgagtcctgaggtgccttccagcaccagtgaatggga

SEQ ID NO: 5194 - DNA, 303 bp, Homo sapiens
tttggaatccagatctgatcacactgtaaaggggcatgacatttgaagacatggatgaagaatgatgtgagaagttgggggcagaggaaacttattggacaacactgaaagtgaggagagtcctactgcaaaggagtgagaataagatcatcaagaaaagctgagacaattaggggctataaagaattaagtaataatgagtgttaaacctttcaatggagttaccttttttgtatgtgactatctaagaactgtgggggagggggaaaggaataaacgaaaaagaaaaggcaaaaaaaaaaa

SEQ ID NO: 5195 - DNA, 380 bp, Homo sapiens
gtccagaaggaggctggttctggatgaaagagaagcataagaactccatccacactattgcaaaagcttcaagttcctacagcagcaccttaatgtggaccaatgggagaatgtaacgcagtggaataaatggaagcttattccaaagccaagccatagaagagcaccaaatttcccacagattgtctgttcaatccccagcatcgacagaataatgtccagcctccctcctcacctccgcttgatatttacacccaacgaacaatggtcaaatggaaatctactgcttagtttataggttttcgggcttgtgacagttccactgtagatccctaatcaaagttggattcaagagcatggcttaggtttaaagccctgcg

SEQ ID NO: 5196 - DNA, 387 bp, Homo sapiens
attggttcatattacagtgccaggaggttgctttctgtatttccaaagaagctgctgactggaggaatttctgagagaatgaataaactctgatccagaagtggaaaaaagaggctgaatggtttctgttactatcaccattcgcatgtcaccatctgctgggcggtacacagaaaaatctttctgaagcacaagaccagctatgatcctggaatctgaaacaggaaggccagtgacaccaacattcaactctacaaaatggtcatccactaactcaaatacaccaatcccacttttacaagtcatacacttgaaaaagtagtcacacatcaactgtgaaataaatttatgattatttcttcccactcttccacaaaagtatgcttc

SEQ ID NO: 5197 - DNA, 578 bp, Homo sapiens
  misc_feature 428, 463, 472, 507, 546, 563: n = A,T,C or G
ggcctgagggaagctgtggttactctgcccagcgatagaagaatttgtgacagatgcaagggatcatcaagtaccttctgtgttctaggagaaacaaatctgctaaagggagctgatgtaaacccctgaccccgaaatgaaaggacagcagagaaagattccagtcagctctgctgccacgttcttcagagtgaatgagattaattcttttaaagtcatataaacaaaggctttgtgctgttactccacaaacaaatgtgaaattccagaagctgagctttgcgcacacctacctgtaaaccccacacttgctttaatcttggattaagagctgtcaggcttggtgctttgagctagcattaacctcctgggctttccagtgtgatgtttggaaaagtccaccaattattctgcccttgctgttgganaagttgtgccgcaagggggaacatagctgcaaaangaaaactgnctgattgggctggatctgggcccccccaaaatctnatatggaattttatcccaatgttgaagaagggccctggnggaaggggattggatcntggggatgaattccc

SEQ ID NO: 5198 - DNA, 186 bp, Homo sapiens
  misc_feature 28, 30, 39, 41, 91, 94, 101, 116, 119, 122, 125, 127, 149,155: n = A,T,C or G
cccagcccattgcccttcacttgggggnangggcccttnancatttcttagcccgggcgggctggccacaagacttgcttgggggccattnttnccattgnacggaaatgaagggncgngtnggnancaagggaagtccattggaaaanaacttnaaatttccgggaaaaactttccccttgtaaa

SEQ ID NO: 5199 - DNA, 209 bp, Homo sapiens
  misc_feature 20, 37, 42, 98, 154, 177: n = A,T,C or G
aatagagcactgtgggaacnactctgcgagctgctanctggnaccacctggaacttgggaccaccgtatatctggcatgccatttacaagcgtccgantgtctacattggcatcacataccttgtgaccacatcggctatacatcattggagtntatgaggaaaaagcgtcgaagtncgaacatcgcgtgaggtacgagtaaagttcaa

SEQ ID NO: 5200 - DNA, 203 bp, Homo sapiens
  misc_feature 26, 31, 45, 48, 59, 62, 75, 87, 100, 101, 104, 108, 112,127, 134, 144, 147, 183, 184: n = A,T,C or G
gtataatttcagacttcccttgacgncggcncaatatatataaanggngacccgccttntgnggcccataaatcntacattggcgtnttatttacccccnntgnaaangganacattacctctatanaatcccnacacttctgngtntatttttacccccccgaattctttccacatacgcanntaaaaatgttaatctatat

SEQ ID NO: 5201 - DNA, 264 bp, Homo sapiens
  misc_feature 31, 36, 38, 41, 44, 49, 50, 51, 53, 62, 69, 91, 98, 102,118, 124, 140, 147, 151, 154, 156, 160, 182, 192, 201, 236: n = A,T,C or G
gaggggagagttctgatgcaagtactcactncgagnanacngtntggtnnnanatgaaccantagagantatggcctgagggaatgcttgnctcattntttnaggaaagctttaatantatgcnaaaataaacgaggtgnttttctnctantancnctcncattaggtggcccttcaaatantctttggatntgcagcacntttcttgggctccaacaattttttgaggaaagaantaaattcctcttggtttttaaaacccac

SEQ ID NO: 5202 - DNA, 108 bp, Homo sapiens
  misc_feature 17, 19, 44, 47, 49, 50, 77, 81: n = A,T,C or G
ttttgtcatgtttactntnctacatgatgatacaaatgacatcngananngtgcttcttgtgactccgccattgggnccanaactcttctcccactattgctgtgtga

SEQ ID NO: 5203 - DNA, 236 bp, Homo sapiens
  misc_feature 34, 60, 81, 82, 94, 106, 107, 144, 145, 147, 155, 165, 167,168, 169, 189, 192, 194, 195, 197, 206, 215: n = A,T,C or G
attaagcaagctttgctggaactgtcaccccttnctgtgcttctgggttgaaaactcatncatcacctgcctgaataggtnnattggccttcangagaaaagtcanncaaatgttaacatgcaggacgattactggaaaacggnngnaatggggncacggcagcntnnngttaacacagctgattttgntcncnngnggggggccnccctggtgnaatccaacttgagctggctgg

SEQ ID NO: 5204 - DNA, 283 bp, Homo sapiens
  misc_feature 18, 28, 46, 50, 68, 81, 96, 166, 172, 193, 202, 214, 215,222, 224, 232, 246, 257, 262: n = A,T,C or G
ggatggcttgtttaccangctcttgggnctttcaccatcaaaaaanatgngctagggaagccttatancacccaaaggacnctagtaaaggggaanggcccacaaaccatgccttttatttcacttttggttggggcttccttcaattcattggaaaccaaattanaccggnaatattttttcttccgccaanaaaaccttngaaccttggccnnaacaaancnttagacanaattttttttaatncaattccttcnccccnccccaaaagccccactttttt

SEQ ID NO: 5205 - DNA, 126 bp, Homo sapiens
  misc_feature 22, 29, 36, 52, 59, 68, 72, 82, 85, 86, 105, 107: n = A,T,C or G
cagatcctgaaggcgccagggntctttgnccctgtncactatctgttgtggnctgcttnacaaccatngctnctgtcccccnttnnaggctccatggctgctgantnaaagaacagctttgacata

SEQ ID NO: 5206 - DNA, 455 bp, Homo sapiens
  misc_feature 71, 241, 256, 263, 267, 268, 322, 380, 398, 406, 439: n = A,T,C or G
gaggattacttttctgtcctcttgaagttacaactggatgcagaacttgatctggacaccaaaatgtcagnagaagtgatatgagatacttctgaccagaagttttgtgaaaaagttcattgttgccaacctcttctccccctgcagaacccaagtagaggctatcctcaatctggtgagacaacccccatttctggggctgattcaccctgacctttgcccagaatggcatttcctgggntgggctttaaaaaanggactangccnnaaaaaatatttccagaacccaagccttccttttgccctctagattttgggctgncttctttctgagctactttaggtgggaacatggcatttggagtatttatcattgcagntggaattgcacaaaatanttttggantattggactccaaagaaagagggaggacatgantgaatttggagtagaa

SEQ ID NO: 5207 - DNA, 172 bp, Homo sapiens
  misc_feature 23, 27, 31, 37, 42, 48, 52, 96, 97, 105, 127, 128, 151: n = A,T,C or G
caactccaactttccaagttctntgcnttcncttccnggcancttatnactntgacgacaaaagccattacaccaaggcggcaaggaggaagcccnncgcccccnttgttcatttgaaacttctttnntattcaaagtgcttgccaacaanccccagtaccaacctcccctc

SEQ ID NO: 5208 - DNA, 171 bp, Homo sapiens
  misc_feature 39, 69, 76, 85, 89, 101, 116, 123, 132, 135, 144, 155: n = A,T,C or G
acagcatggtggacacaggatgggtgttacagattctgngcataacatccaaatatggggcgaaagctntcacccnagaaacatnctangaggggccaaanagctttattccctcngtggctntcttgtagnganaaaccactntatgttttgcncgaaaaaaaaacccaa

SEQ ID NO: 5209 - DNA, 318 bp, Homo sapiens
  misc_feature 112: n = A,T,C or G
ttccagggagaaggctgtgacagtgctgagccaaacaagaaggaaacaaccacagagaaggaaagcagaggatgacagaagaactaatgaaaaattaacttatctttcaacntccacaatctgtctgctctttgaatattttaaaggaaatattgaatagcagagaaataaattcctggcttaggtttttttttcatcttgcagagagtgagagattctgtcataatgggaaaggaaacgaatttcttctcaacatgttaaatattaccagctcaaaactaagtaaccaataaattgctacagacaagtaaaaaaaaa

SEQ ID NO: 5210 - DNA, 312 bp, Homo sapiens
  misc_feature 76: n = A,T,C or G
atgctgcccaggcatggtggtgaccctctctaaacaagcacactcagaatttccctggctcggctgggcgactcanaagaaaacttggccatcagcttctgcctcaagcgggtgctgtggcaaggaagacagagcatgtgtgttgtgaacactcattagaggatcatccctgctgtgccaggtgccatggcgctggatgcagaaagcaggacacatggaaagatgggtgtgttcacaaagaatttggaagaaagccagatggtgacaagagtgtgtctctgaatgccccttttgggggtcactaaaaatgca

SEQ ID NO: 5211 - DNA, 550 bp, Homo sapiens
  misc_feature 26, 37, 47, 54, 98, 105, 154, 164, 181, 186, 190, 204, 218,226, 233, 239, 304, 308, 331, 364, 381, 394, 395, 396, 398,415, 433, 439, 457, 458, 476, 478, 504, 508, 513, 531: n = A,T,C or G
aatttgaggtacatgcacactggcanggactataccnagcgaacagntatgccnagtgcccactaatgagaggcagggaaaggtgggaaaccacagantgtctancataacacaattgctctatttaccctatttttcccagaggcgtaaccangaccaggcanaactcttttgtcctctncaccngggnagagacgcaggaangcgcacgggggagncatcgtgnctttccnttgggncctctcgcatagaaacgtggggaatggcacaccttggtggtacattgtagaccaagatggttttncgantcttcgacgccccagtgactctnttataagtgggcattcagagcggtaacactggngcactcgcggcgaacanagggaacgggacnnncnacaccttttattggaanttaacaaggaaggggtgngggaangggtcccttaattggggnngccatttttgggcttggnanactcctttttaacatttaatcccccnttgnactcnttgggggaagacctcgcnaaatagacccaaacatttt

SEQ ID NO: 5212 - DNA, 332 bp, Homo sapiens
tcgaagaaactaaagctcggaaagattatgcgactgaatcaggaatgaactcaggaggtttaatcctgcagcctgtgctaccattgtgctgccctatcatatgttacgctatcatcaccagcagtggctcataatccttttcggaccaaacgatctcaggggatttgatgatggcgttcccagaaatctacgtatatgcccaactttgaatataatttcaaagagtccactgaatgcctgtctgcatcccacccattgacctttatctaccccctggcacagggatctctgcaaatcgggctatgacctcttactccacaggattaaaatca

SEQ ID NO: 5213 - DNA, 581 bp, Homo sapiens
  misc_feature 450, 474, 492, 503, 519, 564: n = A,T,C or G
ctgttctcttcctacggactgaatgaaaaataaaaggaagtcatttctgcatgtgtcacagaggcatcctttggttctaaaggaagctaagttggattccacaagcccatggtccttatagcatgtgaataggattcagtcacggacgagaaggaagaggtccaggagagactgtaatcgccctgtccaggctaaccctccagctgtgcaggagtatcaagtccaaaaagaagctcttcaaaccatctgggaagagaaaacagcatgacaaggaaaggtgtatttgtctgattctaggaatcaatataaacatccatgataaccccatctaatttttaaatgtatgatttggatgaaacaagagaagacactgattgttgctgagtccctgctgtagtcctgacacagctggagatgccctgctctccttattttcttgatgctcatgangaccctgatgtctaaaggaagaanggtcttcgtcaggtctgnccctggtgtgncacgtgccaccttgcnacgcacacgagaacctgacagggtttatgattttagaacataagntttatgaatggtagggc

SEQ ID NO: 5214 - DNA, 168 bp, Homo sapiens
atccgagtgatggtggacctgtgcaacagcaccaagggcatctgcctcacaggaccttctggaccaccaggacctccgggagccggcgggttgccaggacacaacggattggatggacagcctggtcctcagggcccaaaaggagaaaaaggagcaaatgaaaaaaaa

SEQ ID NO: 5215 - DNA, 467 bp, Homo sapiens
  misc_feature 431: n = A,T,C or G
gtatccaagatcaagagggacaattacatattataagccgcacagagaagagtaatcaaggtggacatgaacttgtgctatataagttatgggttgaagaactctgtggaaagtagagaagaaaaaatttagggaacaagcagtagttgaatacagctatgtgaaactatgagaactatgtgaaagagtgtttggatccaaagatgaaagagctgacacaagagtggattttctgagagctgtttgagcagagaaaacttgaaggagatacagtgagtagaacacaacctgtaggtggtttgaagacctgaggactccaatacctcccaactctcatattctctatagtttttctagaaaagcccatgtattggggcataacctataaagatgatagcaactaaaatggataaatcaatgacataaaatgnttatttcttctcttgattaaatgacagataccccaa

SEQ ID NO: 5216 - DNA, 244 bp, Homo sapiens
  misc_feature 179, 205, 208: n = A,T,C or G
actgagaggagttccaaactaaaaataaaccacagatctcagcaaggctctataccctggctgttgcccttgtcactgacttttccttattgaaagctactcagagacctgaggaaagctttgtgctaataccgatatgattgctgtcatcgccactacctggataacatcactattgnaaaacctcagattgcggctcaaaganagntttcagaccctgccttgatggatcagcttgcactac

SEQ ID NO: 5217 - DNA, 479 bp, Homo sapiens
  misc_feature 348, 370, 408: n = A,T,C or G
aagaccctgttagtgaccccagcccaaatctgaaaggcatttgcatccctgtgagctgggatcagcgcacagtggccggtgcctgatctccacagagcgagcacaggaggtcgactttctgggaggaagtaaagaggctgacgcatctgctagactcaaggacagtcccagcagcacctccactgcgtgcggagagggaggaagcgccacggataaggagagccagcttcacagtcaggcacagcctcaaaccccagccgtgccgctttttggagctgtgacctccttaccctctcccagtctggttatcctcacctggaaaacggggttggccggtacgtccgtccnagggttgttgcaaagacagaanaggagcgccacgcacagactcacaagaggagctcaagngacgctgggcccttccttcccccactcatggagttctgcaacaccgaaaatcccgttcactcaaaaaaaaa

SEQ ID NO: 5218 - DNA, 279 bp, Homo sapiens
  misc_feature 35, 71, 76, 88, 92, 131: n = A,T,C or G
gcgctggggagctcctgctttaattcagaacttgnaatttttaaagccagcttaaatggatcctgcagccntaganaaataaattctncctnggggagcttggaaggtgaatttttccaggcttacctggnaatgcttgatgagaagtgcagccccacagccccctttactggcagcctttgtgagacatcaagcagaggacccaactaagttgtgcccaccacttctgactcacagatactttgaaataataaaagtacattgttttaaaaaaaaaaa

SEQ ID NO: 5219 - DNA, 784 bp, Homo sapiens
  misc_feature 23, 34, 39, 42, 51, 64, 74, 103, 114, 135, 137, 138, 145,154, 168, 189, 203, 218, 262, 267, 695: n = A,T,C or G
tggggaggagctgggctagcttnctgggatttanagttnaanaaactggangggcttttctttnttttaaaggncttggataccatttaaacaacaagatgcnttaccacttgngggccccggaaatttggattntnntaaaatncttgggttnggaagggaaatganaccttgggaccccaaaaccancccatttgaccttnggggagggggttggnaatggtaccaaacaagcaaactgggaacccacattggtggttancaaantttttgtcacacaactttgggaagccccaggggcacttatcctaaagcttcaagaaggaaattggcccacaaaatctttcacgaagcctcaatcattccattcctttgtttcccggggagggcatccttgcccaccaagtcagggcaaggggggctaaatccaagatgtccagggatgggaaagcctttccaagcaagggagggaagcaagggtgtaaaatccttgccacccaggggaaaccccaagcagggcccgcctcccaactcccaagtgggcacaagatggacgactttgcaagtgggaccaccccttgcagggcatccaaagggaagcacacatgccattggagggaaagccaccacaagaatcaagcaaaatggaaattcaagtaagcttgttttcaaaattttttcaacttaaagcttgnccttcgaaatttggtggaattacatggtgaatcttttatcaattggattaatattaaatggaataagaattggagaacacaatttggcc

SEQ ID NO: 5220 - DNA, 439 bp, Homo sapiens
  misc_feature 91, 104, 198, 212, 287, 294, 336, 383, 384, 396: n = A,T,C or G
caggatgggagcttttttacaccgggctggggaccctccctttgggcaggagggggcccaaatcccccggcttcttgagccccagtgcccnggtacaggaaccnagggacttggaggggtggcccgtgaagggtggcggtcaaagcaacttcatggagaagacattgtggacacggccaggatggaggagaaaaaccnaaggatggttaccncccaaaaggttccttttcaagaaaactggggctaaccttttggtcccaagtcaccacccccttcttttgcccaangcctggnctttggcattattaaaaacccttggaaaatctttaaacattnaagtcaaagaaaaggcccctacagagggtcactgggacttgggctgnnggcttttaaccnttctaagaaaaattgggttaaaccaacccaaaggccaaaaagg

SEQ ID NO: 5221 - DNA, 114 bp, Homo sapiens
  misc_feature 28, 31, 49, 60, 62, 67, 74, 79, 91: n = A,T,C or G
tgaggacgctggggagctacctgcttantgnggaactgcccatgggacnaaggacggaantntaagnccttgtncttcntcccgtgaaacnaagcatagcttcggcacttggct

SEQ ID NO: 5222 - DNA, 464 bp, Homo sapiens
  misc_feature 385, 405, 424: n = A,T,C or G
gcctcagcaagcattacattgctcacttcctacgtgctaaggtttttctttgccttatgtgattagatgtgccgaacatacttccaagatctaaaaagcagcaaaatttagggaagcaagaagtcaattgtattctggccttctgctgctttggaatttctgctctctcagagagctctaaagaggcatggcaacacagagcccctccttcctggtgattattatacaaggctcccactggcctgttcagctggggcggggggagttgatgctggaacagaatcatctgccggctaggtatcctggaacagtaattaatactgtttgaatggctgagactatccaaaaccaaccactttctttctactaaagaaaatttcaactncaaacccaagacctggcttncaatatagcaaaaactccncaaagagaacataaaacatcaccaaagtcctggtcaaaaa

SEQ ID NO: 5223 - DNA, 525 bp, Homo sapiens
  misc_feature 26, 37, 41, 81, 92, 94, 96, 117, 164, 172, 177, 193, 199,212, 229, 234, 249, 251, 260, 376, 422: n = A,T,C or G
ggaagtcccattttggaaggacccgngggggtccacncacnctttcttcacccttttttgcaatgggcgacgtggaagcgngcccggggaangngnataagcctcatgccgtcaacngaagttcaaaagaagcttgggtttacccaagcacgttgccccatctngctcaagnggatngttggggctctcttgnattgangaaacgaactganaggaagctttgggcatngttgnaaatcaagggactcngngaagctcanagttcaaattgaagtacttgggaagaatttggattgggggggggaagcttgggccaaaggggaaaatcaaggggaaaggaaaggaaaaaggaccttggaaaggatcaaggggaagnaaaagttaaaaaagcccgcccttgggcttggaagaatgggggggtngggggcaagggccaagaagcttggaatcaagggggcccgaagcaagaaaacccgcactctttcccaaaaataaaaagcctttcctcctttggaaaaaaaaaaa

SEQ ID NO: 5224 - DNA, 598 bp, Homo sapiens
  misc_feature 498, 578: n = A,T,C or G
attatccacaggtttggcctatctcctgaggtaacaccaggcacatctgttgatctcctcaaacaccaagacagcaacaataatggacttacaaaataaaagctagagagagagtcttttcaaaacacaacgggaaaagtaactcaaaatgagataaccagcagatgctccagaatatggaagtcatctgtaagcgtttagtggaatggagaatgctgaaacagttctccatttgccagatgcctgaaatagagacagatgagctattcctctgaacttcaacaacagcgccagctgaaaaagcagaccctttctgccaagggtcacttgttggagctgttgactgtaaatcagagttctccttttggacttatggtacccagaaaatgcaaccaaaatgttcatatgtgcaccttaccttgggcacaaagaccatcatccttagttgctgaaggtctgtgggggtgggcacaaattgtttagatgttttgaacaaangtacctttttataaaaacccgcatgttgtcacagcatttcttaccttttccatgacacaaaagcttccaaataaaataanccacatttcaaaaaaaaaaa

SEQ ID NO: 5225 - DNA, 191 bp, Homo sapiens
  misc_feature 35, 42, 63, 64, 66, 72, 77, 82, 100, 101, 107, 108, 113,119, 129, 136, 147, 160: n = A,T,C or G
ctctggggatttacctccctttaagtgaaaactgncgtgagntgggttacaaggctacttgtnntnaaattntcatngctcntccccattttgtgccctnnacgggnncaccnactganctacctgcanttcctgntttacaccatnactttaaccttcnaccccttgctgaccccactcatccttaagta

SEQ ID NO: 5226 - DNA, 323 bp, Homo sapiens
gcatttaatcatctcgcatcatcacatggaagaagggactgcatgggatctctaatacccagagcattatagatgttatagaattttctcagtgcaagactcttcacacacacgaatgtgaagtttgtggaagatgtgcaacatgtttaagatgaacatttactaactgagacctaaacccacgcatgccattctcagtatttctaagaaactaacccttgccaaggaaaacaagcagtaagaagacctactggcacttcagacacttaagaacctacataggctgggcacggtggttcacgcctgtatccagcactttggga

SEQ ID NO: 5227 - DNA, 261 bp, Homo sapiens
  misc_feature 28, 30, 39, 57, 67, 71, 95, 105, 113, 162, 178, 213, 221: n = A,T,C or G
acaaaccaccaccctggggcaggtggangnagcccaccnttgggagaaaaaccccgnccaggagggnaacnttccaaagcctcttcctttcaaanttgggtcaancgggccangaatgaaaagaatgttttgatggaaaagaaaaatatttattggggccanggggtcttggcccaanaaagtcaattcattggggccgcttggcattggggnactattancccagaagaaacctgcatgggttttttaattaaaaaaaaa

SEQ ID NO: 5228 - DNA, 411 bp, Homo sapiens
  misc_feature 339, 386: n = A,T,C or G
cgtggactctcttgagtgcctgttactgtaccaaaggaccgaaacggtgaagttcattcgactcagcaacctttgctaagagcttactacaaggacacccaggtgaccaggacccagtccctgctaagagcttactaccaggacacccagacaacgtcctgctccggtgcccggaagacacgcgtgccaggcttggctgagtcctgcagccccagccatttctctccacggtcattctcagggctttgctgacccatgtgagcaagttcccggccaaatatccacatctcgtgtgatcccagtgtaagacagaatgtcttctttggtagcacctttttnttttggccttggattctttaattaatctattttcaaaggaataaatnggtgccctgcaactccaaaaaaaaa

SEQ ID NO: 5229 - DNA, 565 bp, Homo sapiens
  misc_feature 23, 34, 45, 72, 75, 79, 87, 93, 105, 114, 115, 124, 126,130, 133, 147, 148, 149, 159, 174, 178, 232, 293, 302, 305,320, 358, 375, 379, 383, 396, 402, 406, 407, 417, 438, 448,487, 493, 510, 517, 541, 545: n = A,T,C or G
aaaggtggagcactgggctgacnatctgtagcangaatacttatntcgtcagcgacccgggacctatctacnaangganacacatcnatgcgnccatttttgtgnactgattanncgaacatgntnatcngtncctagaatacaaannntttcttaggnttggcaggatagacngatnaattcccggacgccaatcgtgatctacgagccacttggctcacactccactccntatctgctgaaagggacacaccccgaagtatttgcacgaactataaaaccgcactgtctgncatcgggancanagcatgattggtaantgccaaggatcccccaccttgctttacaagataagtgngtaagaagaaaaagacntcanattntgaagccaaaganacttgngttnnatcctgactntgccattactagctgggggcncaaagggttnacgatctggatcttgcaagactggtgtctgccttccctnttcctnttgaaataaagtcctgngcttacncaaataagacaattggcaggtgangtanggaataatgctggcccattt

SEQ ID NO: 5230 - DNA, 112 bp, Homo sapiens
  misc_feature 33, 69: n = A,T,C or G
gactctggggaagctaccttgcttaagctaccnacttaagggtggggcccttaattccatctgtccttntttaagaaaagaaggaaattttgggcccccaaaaggaaacccc

SEQ ID NO: 5231 - DNA, 347 bp, Homo sapiens
  misc_feature 58: n = A,T,C or G
aatgtccaggggccaatttaacatatgatgcacattgcttgccttagctgaagaattnctagtacactttataaagaattctcgtgggaacctagaagacttgaaaactctaatgtcagggctggaatgtcaaatgtggcagtgactttgcttcaaatctgcaatcaagagcaacatcccagaaggtgttaattcatttcattacttaattaattaatataaatgagccaggcctaaggccctgagtgaatgcacggagcagaactgctctggcagcttggaccattctcctctggactattattttagataaaaataaatttttaccttgtttaagcaaaaaaaaa

SEQ ID NO: 5232 - DNA, 545 bp, Homo sapiens
agtttgagaagcactgatataaaagacaaactgaaaagaagaaaggaagaggggtagaagaaaggagggagagaagaaagataagatgctggttagaggcaacatccacgttattatggaagtggcacccaacgctaacctcagatgcaatatacagggggaagccacagacagcgcattctgctatatcaagaacctcagaaccttaagagtggagcaatccgtccaactccttcattttccaagtatggacaccagggtctagagatgtaaaaaccttgatcaagatcacagagtaggttaaagaaacagaaacaagcaatcatgggatccctagtccaatgcccttccctctacaccaacagaaaataacacttgatgttgagctttctctcccatacccaccacttatatgctgacaatgtatgtcaatgtgagaaaatcagagccgaactaaagaccaagtcttcagaatatgtcacgtggtcccccacaaaaaggctggggtcaagtgattcattatttagcacaggtttttggtgcaa

SEQ ID NO: 5233 - DNA, 386 bp, Homo sapiens
ggtcatcattaagagaagagccaagaaagggaccagaagacaagctggccccaaatgaggctgaccccaatgctgaggcagtgagaatgagtgaaacatctagttgccagaggtgactgcgtttgtctgaggataaaatagctgcacacaaccttgtgatgaccatcctctgcatgccccatgggaagtaccgctaggcctggacacaaggcttccttttcctgggctctctactgggctcaatcgcctaatgaccctacaaatggaacaatgtactttcaagaattgagtaatatggatgatcaatgtgttactctcgtcctgattcgaaacttgtcttttcatggagagcaataaatcttatcagtagatgccaaaaaaaaaaa

SEQ ID NO: 5234 - DNA, 465 bp, Homo sapiens
gtctttggccagaactactattcaagaatttccagagtgtttgatccatcaacaagggattttgcataatatcacattacactgagaaacccacttaatagcaaaggagagaaggcagtggcacatgataggattcattagtcctatcatatactgtatgacttagaagctgtcactctgatagaatgaagaagtggccttttggagaattttctatggtgccatacttcagatgggacctttgagcatcatcttccagaatgcaatgaacatgctacatcaataacaactataggtactatgtccccagtaggtagaattcatggctccattagccaaggagtaaaattaggagcatctttcttaccactgcctctaatgatcaacttggagaatttgtgctttctatcccccctactctggactctgaagatttggaggttctggcttccaaaggaagaagga

SEQ ID NO: 5235 - DNA, 108 bp, Homo sapiens
  misc_feature 39, 66, 74: n = A,T,C or G
atgctgtttgtgaggccctgcacagaggattacgaatgntataaactgaaccatcccaggtgccanggcttaancctgcctctactcaatatacgcaattcagaaaag

SEQ ID NO: 5236 - DNA, 548 bp, Homo sapiens
  misc_feature 305, 375, 401, 425, 489, 490, 499: n = A,T,C or G
gtctttccttctttaagtctgataccattaacacagatgctcacactggggccagatctgcatctgttaaatcctgctgcaggaatgacacctggtacccagacccacccattgaccctgggagggttgaatgtacaacagcaactgcacccacatgtgttaccaatttttgtcacacaacttggagcccagggcactatcctaagctcagaggaattgccacaaatcttcacgagcctcatcatccattccttgttcccgggaggcatcctgcccaccagtcaggcaggggctaatccagatgnccaggatggaagccttccagcaggaggagcaggtgtaaatcctgccacccagggaaccccagcaggccgncttccaactccagtggcacagatganactttgcagtgaccacccctggangcattccaaggagcacacatgccattgagggaagccaccccagaatcagcaaatgggattcagnnagtggtttnaaattttttaactaaactggctcgaaattggggaaacatgtgaaacttt

SEQ ID NO: 5237 - DNA, 354 bp, Homo sapiens
gctggcatactacccgagagaatgaccagtgccaccaagggaagggcacaagctcactggttccaggggagacatctcaggggacaggaacatcccctgacgctgaatgagtgcagcacacagacggagaatacacacaagagaaatcatgaggacatgagagaaggcactggcaataggaagttacaaaaagcaacaaaaagaaagagtagatataaaaacaataatcgaagaaagccaacaacagatgggatgaatcatacgaggtatgcgactcatggatgaagaggtgagtgatgagatcagctggggaactctctcccaggaaagacaaaccagaagaaacacaaatga

SEQ ID NO: 5238 - DNA, 603 bp, Homo sapiens
  misc_feature 513, 565, 576, 584: n = A,T,C or G
actcctcacttcatgcctggcatgcttgctgagtgactgctgggtgatgtaaatctcccaactcaacagagacgcccatccagaccaggattcgcccactctcccgggctcctcatcgcaacctgacattcctggagggcgcagggtttctgccaccagccagttgcataatcccagattggggaaatggaggccttgcccaagatcatagggagaaggaggtgcagagcctagcaacgaagccagagctctgtggctacgagcgggttcactccagtgctgggggaagggggctgctaactaatgccccacagcttccctgggtggagttcagactcagctatcaacacccctggctcaagcagggcactcagctcctggctccttaccttcctggattctgtgggcacagggaggcatctcgccaggggtgagtacgtatagagctcaaaagcagggagtgccaagaacatggggagtggattcaacctggactctctgagtgcaatgggngttggcctacactcatgaagtctctgaacataagcctgggtacccaaagatnccctctaatangaacaaancgtgaagggtggcctgtgt

SEQ ID NO: 5239 - DNA, 410 bp, Homo sapiens
gcaagaaaggagtgaagaacagaacctgctgcttaagtcccttttatcaagaaatgcaaaagccttccccaaaggctttttgacctcccgcctttgacctgatccttgttggatagactgtgtcatgtgaccacacagcctcaagggagaatggaaaagagaggatttaatgtttccagcccttacagtctcatgaaagaagtgtgacaacagagaaggggcttgggtatgatgatgggtccagctaacctacagtgtctgcaactgcacacctaggatacaaggtggagacagagggcactgtgcagtttttctgagtctagggtgggcattattgttttggtgtatgaccctgggtgtccaaaagagactcctgacaataaaacttagagttctgcgttcttgtgaaa

SEQ ID NO: 5240 - DNA, 544 bp, Homo sapiens
  misc_feature 465: n = A,T,C or G
tttcaggaggcaaacgtggcccaatccagggaaatcagcagatggcatgtcatggccatcgcagatctgaggagctggcctttgggtgacttctggtccacatgacaaacattcaaggtgaattagaggagaaaagctacatgaagtgatgtgcaagttgaaaagagaaaagggtgtggtgctatccaggaaccatctaacgaaaaacctcttgcaaggcagattgagaattttaaaacaacactctccgacccaactgccccgtgacatctgttaacacaaaaggcagaactatttccaggaaaagctcccagtgtttgcaaggcatccagcaaaacagaacatggagactgaggacagaaaagagaaagaagcgtagggcaagacccctcctccaaattgcagggtgagatgtcaagactgctgcttccctgatcaagataacagaatgggccacaagtgaangctctagaggaacaggaatatggataaaccccagctctggaaaaaatccccaatcgtgaagaaattcgttttggaaatt

SEQ ID NO: 5241 - DNA, 402 bp, Homo sapiens
ggggaagcggcaggagagaactaggacatctttcctcgctgtgctggccaggaccgaggcagccagagtgtatggctggagaaggacagagaagcagcccgttcgcctgcagctggggtgccgggctccacggctgacagtgagtgagaagggccagcacctcacaccctagtaacggccaatgtgacctgagccctgctgacctgatgcctagccctgcagcggtcacatccccgaacccagccctgctgagaccatttcgtttttgctcatctctatgggcagcacaggcctgacaccgtagtaggcactttataaacatgtgttaattggttgaatgaacataagcaatgatcatctccattgctgagataaataaaccacagctcagagaaaaaaaaa

SEQ ID NO: 5242 - DNA, 306 bp, Homo sapiens
gtctgagcagagggcggggtgcaggcggaatggccctcgtgccctatgaggagaccacggaatttgggttgcagaaattccacaagcctcttgcaactttttcctttgcaaaccacacgatccagatccggcaggactggagacacctgggagtcgcagcggtggtttgggatgcggccatcgttctttccacatacctggagatgggagctgtggagctcaggggccgctctgccgtggagctgggtgctggcacggggctggtgggcatagtggctgccctgctggaaaacactggacaaatgg

SEQ ID NO: 5243 - DNA, 329 bp, Homo sapiens
gaggcagctgtatggaggccaatatgcagacaagggaagtaactcaggcattttgggggagaggtacagaaagaagagaaaagactgaactgactgctgttctgaacaagaactgtgactatatgtggtactcccagaatgctggtttcctttcagacccatcaagtggccatcctattggcttggactgaagacccccactggagaactgtctctgcagcctatactgatgacactggccactgtccagggctccaccccaaggagtccaagccccagacatttagccttagagagaatccagattttgcatttccagtgcagggatt

SEQ ID NO: 5244 - DNA, 116 bp, Homo sapiens
  misc_feature 20, 29, 43, 57, 85, 99: n = A,T,C or G
gaagcacataactggacctngaattccanctcatctgtcctgntcatgtcatgctangctgcccatgcctcaactttatcaatanaatgagggtgttgngatgactaaaaaaaaaa

SEQ ID NO: 5245 - DNA, 251 bp, Homo sapiens
cactccttcctgtggattttctccctccccactggaatgtgatctgcatgaggtcaaggactgggaccgaattgtccctgctggagtctccgtgtctagaagaatagtactggacccacagcaggcgctcgatagatgtatgcatacagacagagcttcggagatgcacggctttgggtttgagtcacgattctcgcaccaaccacctgtgtagccatcatgaatcactcaatctctttgaaaaaaaaaaa

SEQ ID NO: 5246 - DNA, 743 bp, Homo sapiens
  misc_feature 31, 36, 43, 49, 58, 67, 70, 72, 73, 75, 87, 88, 93, 95, 100,110, 141, 155, 161, 200, 217, 283, 297, 370, 386, 394, 412,470, 473, 482, 483, 500, 518, 527, 545, 553, 562, 565, 566,567, 571, 574, 578, 591, 594, 600, 605, 609, 612: n = A,T,C or G
  misc_feature 614, 620, 623, 625, 632, 634, 636, 642, 643, 646, 653, 658,674, 681, 683, 717: n = A,T,C or G
aggcctaaacccttggccattttaaaggttncaagnaaacctnggaagnaattgtccntggggaagngtngnnanactgtttgggannccccncnttctncaagcgaganacacaattctagcctaggcacttgtgacgantcgttcccattgcngtcgcnagttcgggccaagaatgcttggcatgggcatgccttcgngccccttctatcgcgtncttgcatcgtctacatcgagtttcggccatcaacttggaccacacaacgattctaccacatgggcnaggaaaatttgaangaagggaaggaaacataggtctttaccattcgaaaaggctaggactaggtaggccaaaggctatcgtacatanagggacgtacacatangggtggtngttggcgattgccgtcanttcacaaagggaaaacccctattctttaagacccgtatacaaatatccccttcgtgtnggncgatagggnncgaaacaattttggaangaacaaatctattttaancgacaaccntttcccccttttcctttngccggaancgcgccaanacnnngggnacncccncgattgggaaccnttncccttngttcncccnccncncccacnttntntgtgaancngnccaaanncgntaatttngtacncccaagcgtaataganaaagacngngccttccaacgttaagttattttcgtcctacacngggtccgagttacaccaatgaccgag

SEQ ID NO: 5247 - DNA, 335 bp, Homo sapiens
ggctcctcaggctcaagcacaacctggaaaaacgaaggtgttaatgttccatgaggcaactgatgaccaatggggagcaggagctggtgaatgaatgttcccttcatccatcctgcagcttctacattgttcttcatctctgggaaatcagtgacccatggactggacaataactttgagccatgcagtcaaaataaaatggaatatttaagtgaaagatcaggttctggaaaataaaactgctcgtagctgcatattatctaccggtgagtaaaacaagtttactgccaccatcttagtgtgactaaaagagggagatcctaaagaattttaag

SEQ ID NO: 5248 - DNA, 261 bp, Homo sapiens
  misc_feature 20, 29, 66, 67, 68, 97, 102, 105, 109, 111, 114, 117, 121,129, 130, 155, 160, 168, 180, 207, 209, 210, 226, 227: n = A,T,C or G
tcccaacatcagcagagacncccatccanaccaatgattcgcccactctaccggactgctcatcannncctagacattcctggatgggctcatggtntctgncancatncnttngcntaanactagatnngggaaatggaggccttgcccaactncatanaggcgaangaggtgcggagnctaacaacgaaatcagagctctgtggntnngagcgggttcactccnnagcatgggggaagggggcttgctaactaatgccc

SEQ ID NO: 5249 - DNA, 652 bp, Homo sapiens
  misc_feature 20, 26, 38, 61, 77, 78, 86, 154, 165, 202, 212, 219, 237,262, 274, 277, 297, 336, 387, 407, 413, 434, 441, 451, 470,482, 488, 515, 546, 592, 619, 632, 636: n = A,T,C or G
cccagcccccctttggaccnaaaaanagggttccaaanccttaagccccccccttttgganggggaaccatttcaanncttttttngggccccttccaaaggggggtccccttaaaattgggggccaaggccaaagaaaaacccccaccttggnaccaaggaaanccttaaggaaaggggaaagttccccattttgggaagnaaccccggtngggggtnccacccccacccctttcnttttcaaccccttttttgccaaaanggggccaagggnaangggggcccccggggaaaaangggaatttaagccccttcaaagcccggttccaaacccgnaaggtttcccaaaaaaggaaagccttggggttttaccccccaagcccaagnttttggccccccccaattcnttggcnttccaaaaggggaaattggtnggggggnccttctttcnttttgggatttgggaaggnaaaaggaattgnaaaagnaagccctttttggggaaatgggttggnaaaattccaaaggggaactttccggggaagncctccaaaaggttttccaaattgggaagtttaacccttggggaagnaattttgggaatttgggggggggaagnccttggggccccncaanggggaaaaaattccaa

SEQ ID NO: 5250 - DNA, 410 bp, Homo sapiens
  misc_feature 16, 77, 81, 91, 125, 145, 200, 249, 272: n = A,T,C or G
gaattgcactgcctgntggaattgagaattggacattgtggcccttgaaaagatgtgggaagccaggggcccagatntccnaggccacaantgggcccacaagtgggccatgggaacataaaganggccagcaaatgggaagganggcttcccagaaaaatggaaagatttcatttaacaaaaaagtggtaaccaaaaanggcttgcttccgcccatttcaaaccaatttaaccccttccaaagggganggggcttgaatggttggtgaaanggaaagccttgtcccttttctaaggggtttggaaaaaatggttttttaaaagcccattaagtttggaattttttggtttcaagtaagggaccaccacccaaaagataaggcaagcccttcttgccaaagcccaaggga

SEQ ID NO: 5251 - DNA, 254 bp, Homo sapiens
  misc_feature 26, 42, 44, 78, 83, 84, 86, 87, 89, 99, 109, 112, 114, 125,130, 134, 146, 166, 185, 186: n = A,T,C or G
gaacccttgtcatccacaatttcccnaaggatgggttgcganancaccacgactcctgcgaaagaatgctcaggggcntgccnngnntntgcctgcctnttccaagaangcntncatcactttcngaaangctntccattgttgancatcataaccggcacatgtnaatgacctggagggctatnnaacactggcttacattggcctcatattgccccgaacagtatcatcaccgctttgccctggtggggaaa

SEQ ID NO: 5252 - DNA, 376 bp, Homo sapiens
  misc_feature 36, 37, 42, 44, 46, 52, 65, 66, 67, 71, 89, 103, 107, 113,116, 129, 136, 167, 174, 191, 214, 218, 219, 223, 324: n = A,T,C or G
ctgcttgctgagtgactgctgggtgatgagttctanntcatntntncagagngtccctgcctctnnnaccntcatctcattcttcctgnctctctctcatctntagnctactntgncattccccccaanccaaggnagggcaaaaggtcccaggggttcccgggganccagggncccccaaatgtgccccntggggatgtgaaaaaagggcccncttnnatgnggcccgtcaaggactccattggacctggggaaaggggaaaagggcaagccaaggaagcccggaagttgcttaaaaaagggccattggaagccttgccttgnaccaaggaaaattgccattgtgggggttcaaaaacccttggaccattgcccc

SEQ ID NO: 5253 - DNA, 308 bp, Homo sapiens
gccaccagagaatctaagttcaagtccccaaacagggaactgggctctcatcctaattcttccttaaggagccaacacagtcattacctccacataaacatgtcaattctccccacgcgcaaccatgagaaatctctcccagccagccagaatggaaggaactaacagcttttggcaagcagcacggtctcacatacagaaggtggctggcatgaggcttgcactcaggtcacagccttctatcggctgtcgtggccacctcttcctagaagaagctctccccaggaaaagcacagaattctgctggg

SEQ ID NO: 5254 - DNA, 330 bp, Homo sapiens
gccctataagtgtacatctgggtcatgctctatgaagagactgttgttatcaatgagttcgatgcatatatttgttagcactgacagattcagacacagatattttccacctccaatgttcagatctggtgtagctgctgggagccctgggctggatatgtacccaggtgactcatggggaaggatgcacccttctgagaagcatcacctttctcaagaagcatgacagagctcccgatattagactttcaagacgtctaccaggccttctttggaataaattgtgtcattgaatggccacctgcatcccacacaacagctcattccgcg

SEQ ID NO: 5255 - DNA, 454 bp, Homo sapiens
  misc_feature 436: n = A,T,C or G
gagtatgggataccggctactgaggataaactggaataccttttccaagaacgtctcccaatatctgaattattcttctctaaagaagcggctgaatataagtatgaaaattctgatgaggaggctcaagaagctggaggcaagaaggagagagaagaggatgaaaatgaagaactggaagaaggacttgaaaaggatctggactcagcagagcacagccccttcaaaaaatccagcttggaggcagagaaataaatagatggagaaagaagaaattaatttcctcttcatggatgttctagttttcagtagctcaaacaactggttttgttaaagttcattacacaaaaatgatatcaactgatatctgactttactcttacattttacatatatatttgacagcatttgttcacgttaaaaaataaaagcttgnttgagatgaaaaaaaaaa

SEQ ID NO: 5256 - DNA, 346 bp, Homo sapiens
  misc_feature 101, 310: n = A,T,C or G
gtttccaacttcagccgttggttcctcagccttctacgccttccactggaacccaaggctctttggtcaatgggcagcccgagtgtttgggctgcttagcnttcagagggatgtgctgctgatgtctgtcctttttaaagagagctagagctgaaaccttactgggaactggaagatggaaacacagcggtgagcctggagcagggcgacgccagcctggaggccctctcttcctgcccacaacctcacctcctcacatctacactgcacacttgcaccggccttctttctgcttcttgggaccacagantgagaagggacccccagtcctgctagctccttgctt

SEQ ID NO: 5257 - DNA, 307 bp, Homo sapiens
gtggggtctttcaaaaggacaccagatctgaatccgtccctgtcctcaagaagctccaggcttagggagggatgagacatacgcgtgagaaagctcagaccccagtcacaacagcctgggtgtgaatctccactctgcctttcctgctgtgagtcatcaagcaaaccacgcaacctctgagcctctgctatgtcctgcgtgcaatggggagaagagtccctaccctgacatcacacttccaaggcacaggcactgtctgtcctgagcacctcatttcaggctccaagctcaggaaacgctttaagtc

SEQ ID NO: 5258 - DNA, 309 bp, Homo sapiens
atgcagcatcgtcagatggagcttattacacggctgggacctcccttggcagaggtccaatccccgtctctgagcccagtgcccagtacagaaccaaggactgaggtgtccgtgaaggtgcgtcaagcaactcatgagagacatgtgacagcaagatgagagaaaaccaaagatgtaaccacaaaagtaccttccagaaactggcctaacctttggtccagtcaccaccccctcctttgcccaggcctggtcttgcatatcaaaaaccctgaaaatcttaaacatcagtcaagaaagcccctacagagg

SEQ ID NO: 5259 - DNA, 325 bp, Homo sapiens
  misc_feature 100: n = A,T,C or G
gcttttcctgctgtagatgcatgaagggcgtgctgagattcaattagtttaccacctcagtggatttctgctatacgtacagattaaataccaatttctnttcatttctgcctttcaacattaaaccaaggtgtgcgtaatgacgacaacagctttcaaccaaaggccacaaagacagcttcacaggactgagcgacgtatccacctggatttatctttatgcaaaagtcttcatttatggcttctttccttgttctttctccaaaccaaccactgtaaactacacaacatggctcttttgcttattcatttttaaaaaaaaaaa

SEQ ID NO: 5260 - DNA, 322 bp, Homo sapiens
atccagaaaccttagctcagacttctcaaatcccagatggattgtaatttgttatattggagaaaagaagaaaatctgtgctccctagcagatgcacaaggactgttttgttagtcacatctgccacgttcctacttttcagcactaaaagaacttttttgcaagctcttcagatcttgattctgaaatgcaaaagcagaatgatgaggcacgtatttcccaccttgccagagatgttttccttctttacctaaatggtctggagtttacacgcaatcatgccccgcaacacatagaggggtctggcagagccataacccat

SEQ ID NO: 5261 - DNA, 473 bp, Homo sapiens
  misc_feature 378, 419, 427, 428, 437, 456: n = A,T,C or G
gctcgccctgctactgaaatttacatgtcacactgccatgataagtcaaccaaccatctcatatatcaaaggagagaggcagagaaagaaaaggaggaggataaagaagaggaggaagaggacgaaaggaaaaccaagaggaggagaagccacttcttactttggattaatgtgaaattaaatagtttactacattttaagtgggaaaacgttagttgaaaagatatttgtcaaccacaaacatttgaaagggaagcattccaaagattttcactgtttatgttcaaattacaacatgtgcagaaagttgtgcaactgaaaatcctttcaaacaacagctacaaaagagattggtcagttatgacaggaatagaaagngggaaacttaaagactggctactccttgtgtatgattgctngggcgagnngggcttganaactttttaccaaaggggnctttgctgatatgagaa

SEQ ID NO: 5262 - DNA, 185 bp, Homo sapiens
  misc_feature 42, 46, 50, 74, 103, 125, 139, 159, 169: n = A,T,C or G
cgccaattttttaaaaaatagagaccaggcgttatagaggcnccanaatnttctttttttagcgtttttttctnacccccctagggggaaaagggaaaaaatnaccttcaattaaaagacccacncctgctttggtgtnatttttaacccccccacatnctttcaccanaagggaaaaaaaaaaa

SEQ ID NO: 5263 - DNA, 324 bp, Homo sapiens
ccaggagacaggctctggagaagaaatgaatgctaaatggggatgagaagatgaatccagcagaactggtggtaaagcattagtgactggacctatacaatgaatgggactggatgtgactgaaaacacatggcaactgattcattcttgccttattaagtcatcttcaaagtcaagcaaagtaatacttcccatttccctgcagaggtatcaaggctattcacggtaaatcaggtgacagaaggcttgattcacatccagttttgtggggagacatagtcattgagtaatttgtcttgctcagtgaaggacagtgatctatgt

SEQ ID NO: 5264 - DNA, 353 bp, Homo sapiens
  misc_feature 87, 116, 119, 125, 133, 156, 161, 166, 169, 177, 185, 194,201, 211, 212, 215, 233, 246, 262, 264, 287: n = A,T,C or G
aaacaatacacagttctggccaaaagaagttaaaacaaatgtgaaaaataagcgacatccaagaaactttcaacagcttccttttgntcctatgccttcaagggtacccagaaganggnaaaaangaaccccnaggaaagcttggaaggaaacctngactngcaanccncccccatngctttctnggaaagggnagttggntaagaaagannggnactttttttttcaggggnaagatggtttttncttttggcttccaaanantttgtggggatgtgcacttgganagggaaaggtttcacaaattaccttagaaaggaaccttaaaaagggaccttggagaagatggaaac

SEQ ID NO: 5265 - DNA, 213 bp, Homo sapiens
  misc_feature 20, 62, 66, 78, 98, 101, 123, 131, 154, 164, 173, 181: n = A,T,C or G
tagcggacctcactactcanggtcctatgcccttaatgaacatgcaagaaacgaagctcgantcanttatgttgaatngggacctttttgcgtgcccnatnacagactctttaccccactgcnttactgangatacgttcctgggcgctgggangactgctctntttaccaanaaatttgnaggcggggcatgaacttttaaatcaaaaaaaa

SEQ ID NO: 5266 - DNA, 244 bp, Homo sapiens
  misc_feature 26, 57, 63, 90, 139, 141, 142, 143, 157, 164, 174, 181, 183,202, 207, 213, 214, 216, 220, 228: n = A,T,C or G
tccctaaacttcatccacctcccttntgctctatgcctcaaggcacacacttaggtncaaaangaccccccacagaggctgtgaggaaanctgaactgcaaacccaccaggatgtacttactgggaaaggctgggccgntnnngaaagatgggaccnttatttntgggcccaangtttttncnttggctttcctgactttgntgggnagactnnanagcnagaagttnacctttgataaagaga

SEQ ID NO: 5267 - DNA, 356 bp, Homo sapiens
aggctcaaagaccgtctaggaggcaagcgagcaggtgagcggaagccgagagtcaccggccggccggtaccggtctgacgagtcaccgagcagattgcagctgggcttaggagagataacatcagcatgctgcctactgggagggaaactctcccctcacaaccccaccagctccgtggactctacagccaggctcgcgcatccttggtgaaagccaacccaccccagacaagtgtcaagtgaactaaccctccacttcctaatcggagggagctatttttaagagctaaggtctaatttaagctctgccaggtcatctagaataaacaggtcccaccccaactcaaaaaaaaaaa

SEQ ID NO: 5268 - DNA, 104 bp, Homo sapiens
  misc_feature 27, 37, 43, 54, 60, 61, 62, 70, 78, 88: n = A,T,C or G
caaagctttccattgccgaacaaaaangtcatggggngctttncaggaggaatncaatannnggagtccnggaggctntatagccccnaacagtattattaccg

SEQ ID NO: 5269 - DNA, 217 bp, Homo sapiens
  misc_feature 63, 64, 87, 156, 161: n = A,T,C or G
ggaaactacgcgcaccccttttttggagcaaaagttcaagccttgggttaaaagttccaaagnntggaaatttgggcctcgcttggnccaattttaaaatgggccggcgccctcggaggggaaatttcggggatcccagccgccgccatttttaanattgngcccgccttattgggccaaaaatcttttttggggtttttttaacccttggggaaag

SEQ ID NO: 5270 - DNA, 201 bp, Homo sapiens
  misc_feature 27, 57, 79, 116, 137, 161, 185: n = A,T,C or G
tccaaagcttgaatttggcctcgcttnccccattttaaaaatgggcgcgcccttcgnagggaaattttcgggatttccnggcgcgccaattttaaaaattggacccggcttattgnggccaaaatttcttttttggntttttttttaacccctggggaaangaaaaattaaccttcaataaaaancccacccttctttttt

SEQ ID NO: 5271 - DNA, 216 bp, Homo sapiens
ccattcaaagattgtgaaggccacgtctaaatcctgtgatccaacaatgtgcccagtaagagaataaatggacctctagcggatgggctgatcaaagagggccagaattcacttgaaaattctgaaaggatcagaaattcaccattacacatgcgagcaaaaacaccaattttattttgaaatgaaataaaatcatgtaaatgctaaaaaaaaaaa

SEQ ID NO: 5272 - DNA, 150 bp, Homo sapiens
  misc_feature 52, 60, 68, 78, 93, 94, 96: n = A,T,C or G
cgatgaatgcttcagaactggaggctgtggttgttgacatgccctatacaanggattgtnactgcatncctctgtctncacgacggccactgnntncttcttgccttattaatgcatcgctcggaagctgctctaaaggacacttgccat

SEQ ID NO: 5273 - DNA, 142 bp, Homo sapiens
  misc_feature 26, 27, 30, 42, 55, 72, 73, 81, 84, 98, 114, 121: n = A,T,C or G
accatgtgagtaatgccggattggannacnatccaccaaccngattcaaggcgtntggatgtctgtcactcnngtcgacanctngactactgacatantgatgagactctgcgncccaacnaccctgctaatgtgttcctga

SEQ ID NO: 5274 - DNA, 215 bp, Homo sapiens
ctggaaaattcaacctttacagcccagagaagcatttatgagcgtctattctatgtgactacagctccactaagggtcatgaccaaatctgtgtgttcatcatcatatccccagcacctcttatctattgcgtggaagaatccatttctatatgggaggagacttgtgcaatcagatgttaattaaaatgtgcgcatctttttacaaaaaaaaaa

SEQ ID NO: 5275 - DNA, 480 bp, Homo sapiens
  misc_feature 29, 39, 42, 57, 63, 103, 110, 119, 123, 142, 147, 154, 156,164, 188, 196, 235, 253, 258, 285, 296, 303, 312, 331, 365,370, 384, 402, 417, 419, 421, 424, 438, 440, 450: n = A,T,C or G
atatttaagttctatgaaactgggacttntatttgcttnaanggggtatatggaagnaaaaantttaccccggtaataggggagccccgggaggggaaaaggnattgttntttcacctngggngggggaaaaccggggcttngaaanaatgccntntgaaaaancattgggattcaacaagtcctggnatacttgnggccaatttcatttcagggggaaggataggaacccctanaaaaagggcccttccttncctanaaaaggggtccagaattaataacccantgggggaaagnaatgtcntaggaactnggaagttggaaacccgggntccagggccccaaagaaaaaacttggcttggccnttttngggaaattacccangggattccaaaagaaaangggaagccttggggnananggncccgggcggaaaantngggccttcanttgccccttggtttaatttcccccaaccac

SEQ ID NO: 5276 - DNA, 125 bp, Homo sapiens
  misc_feature 20, 32, 42, 45, 46, 75: n = A,T,C or G
cgtggttggattgatgcacnttggtgctcggnaacgcactgngtnnaatatccttctcttttagagaagtattangttttgcctctactgctgttattggtggatacccattctgggggggcctt

SEQ ID NO: 5277 - DNA, 423 bp, Homo sapiens
gaaaaacattgtcccacaatgggttacttcagatcctgcaggaagcaactgctgaggaagaatttcgaaaatctgcaaaaatttattagaagaaacacctatgagaacaaatgaaaaggttggatgaaagggttgggcagaaggacattaaggaacatttgaattaaaatctctggattcaaaacagatgctcttgtctactgcacagtgttctagtgcctgtttcaaagtcttgatgtgagaagtcaatacatttacaaaaggaaagttctaagacttgccgggaccacttctcaagaaagatttattaggaatctggatcagctctcttaatgaagacaaaaaggctggaagatattttgaaaaatattctttaatgtcttaaagaactgacgatatagtaagaacctataaataaaaaaa

SEQ ID NO: 5278 - DNA, 393 bp, Homo sapiens
  misc_feature 39, 50, 57, 61, 171, 175, 176, 178, 187, 190, 191, 194, 201,211, 226, 228, 265, 291, 302, 318, 320, 326, 338, 340, 351,366, 373: n = A,T,C or G
acctcggacggcttcgcaccaaccagcgccctttttttnctgcaggactntgaatcngganccccctgagggctttcacttgcccgcgggggggaaaaagcccctgggaagtggaaaatgaatggccccccatgtgtggtgaaaaaggcgccttttgggaaaacatggatnctgnngntccaagaantgnnaantgacctntgttctgtgngcccaaggggcccangngaagtgtttttaaaaaaaaggttaactggggggcttntaaagggcttattttgtcccccaagnttgaatgcaanggggcaaataagggtnantggaanctttaacttggntnaaaaagaatcnccccctaaatttttnaggaagngggaacccaaaaagggcccc

SEQ ID NO: 5279 - DNA, 238 bp, Homo sapiens
  misc_feature 24, 25, 28, 44, 45, 52, 57, 87, 102, 110, 114, 115, 126,129, 130, 141, 145, 149, 160, 171, 203: n = A,T,C or G
tgatcagctctaggcttcgactgnntangaaaagtgggaagacnnactgggngaccngctccattttggaaatgatcaaacctggcnaagcgaaagtggttnttctcccnaaannctgacccgatntcnngaaattcaggntggnttcngcctgacttgnagagctacagncagtgcctttcttctgaggcctccatgttcangacccttgggcggagaagaatctgctagacactga

SEQ ID NO: 5280 - DNA, 200 bp, Homo sapiens
atctgattcacctgatgaatcacatgaagatgatgcccaaatccttcaacagctccaggatataattcaccacttctaactgcctattgaacagccactcgaatgtcctcccaatgccatttgttgactgggatggtcttcccacattgtcatagactccaacatgtccaaaattaaactcttcaccccaaaaaaaaaaa

SEQ ID NO: 5281 - DNA, 146 bp, Homo sapiens
  misc_feature 64, 65, 66, 67, 79, 82, 83, 95, 127, 128: n = A,T,C or G
atctgattcacctgatgaatcacatgaagatgatgcccaaatccttcaacagctccaggatatnnnnccccccttttgngcnngttcagcctggntaagtccaagctgaattggccaattcttttgnnttttaccctggaagaaat

SEQ ID NO: 5282 - DNA, 479 bp, Homo sapiens
  misc_feature 75, 128: n = A,T,C or G
ttcacagatgaggggaacataatgtgatgaaagaacacctggaaaacagccaggatgctggaattttagtcttanaagctggtgactttgggcaagtcatcaaatatgcatcgtcctctgtttccttnctcataaaagtggacattgagaaaggtgatcaatgagttcttcatcagctctaaagtctgtactgctgcttctgtacatctctgttaatatatttggaaacagaacaaacactatggcagaagtcacacctaccatgccggctgctgagaggattgaatgagtctgcagctcacgtggataagggcctggtccccagtaaccactgcataagatctacctagtattctattcagtatttcattaatcaagtcttacctgatttatgtctttggttattaattttccaatttgtaaaatgaagttcttggattaaatgaatattaaatgtaccaccactgacaaaaaaaaaa

SEQ ID NO: 5283 - DNA, 424 bp, Homo sapiens
ttgcccaatcagttcctttgaaaactggacctcaaaagagaacccccaaaagggaggccctggtatctatctcagccttggttccctgaagcagagccactactttattcagggtggagagcaatggagagtgcggcagggaaggagggagagaaaacaggatggggcatgttccccaactgacctctgcttggcgtccagtgcaactgagcctgggatcatgaggaaccatcataaaggcagcatcaggacagtccgttcagagagggaaatcccccatgcagaagaccgtggatccccggaaggtcttggtattgttgtcagagaagcctgaacccatacactgcaccaaacatcagcaagcttgttatgtaaacaagtatcacacatacatataggcactattttaagtgtacgtggatgc

SEQ ID NO: 5284 - DNA, 379 bp, Homo sapiens
ggcctacaacacacatctgtctgacggcctgaatatcagggcaatgatggcagcctggaactacatttcaagagttctgagttctcctgggcagccattccctcaactgctccatgctgtcatgccgtggcaacactgcattcctaacaagaagctggtccccgattctgtccctttaatcaccacccaatctgtgagtgtacaggtcgcccaattccggagcctgctgtcctgccactcatcacttcagttccgggggacctgggaagacacggggaggccacaggtgagcctgaggaggaagcaatcttctggcaacaaaatgaggctcaagcccaggcggccttgctctgcaacagtgccttgctcccgccctgca

SEQ ID NO: 5285 - DNA, 372 bp, Homo sapiens
  misc_feature 36, 37, 72, 113, 117, 118, 120, 150, 193, 195, 214, 234,279, 280, 281, 286, 288, 289, 290, 291, 301, 316, 328, 329,334, 339, 341: n = A,T,C or G
ccaaggccatcactggccaagcccatctaaaagccnnaggcagcaagcagtgcccgttgaaacatccataanaggtggatagaacccaaagagaaaacaaagcccaaacagtntcanntnctttactctatgcgaccaatggcatttcancctccctctacagtttgataccttcttctatagttacagaatncntaactttgttttaacctgngatccatggccacccaaaanaagagactatatttctaaaaggacttgcagtcaggaataaagggnnncgggngnnnntgttcagggngtgctctcatggggntggccttcaaannggggngtgancncaagtaaaattgctttgctaataaaaaaaaa

SEQ ID NO: 5286 - DNA, 422 bp, Homo sapiens
ataatagagcatggcaaattggagtcttcaattaagcacacggaatacatgtgctgaattgctttctttgcaaggttcagagtcagaattcctgccctgggttctgagttgctgagtggagacgatgatggagagcagtggagacacgtgattttcagggtgctctttgcatgcatgaaatggagcaagacttatgaagggaaaatgaaagaggaggataggaagatacgtcacctcctgggtttcctccaatcatccagtcctcatctctctatatgtctttgaacactctgagcgccatcatgccaattccatggatgaaacaaatacccatgactcagcatttttctaatgaaaacacgtgcggtctgacccgaaggagaaaccacaaacagaattgagaaaagcaggcaggcaaattt

SEQ ID NO: 5287 - DNA, 379 bp, Homo sapiens
gacaaatgacctgtgaggtgtgatgaaggagagagagatgaacaaaaaagaggtaatgcacagccatggatttcccgaagcccctctccttgagggctcttcttgtgctctggggagatgcgccactaaaagaaaaggctaactgttcaaggtgaaaaaacaccactccctaaaaggagcaagacttggctgcatgcagagataccaagttaaaggaattcacatcattatatctcccagaggacaaagcctagaactttctacattcaagtcagtgaatattggggagtggggaatccatgaattcattatgtggaggcaattttaattcagaagatggaaaccagcataatatagatctgtcgtggctccagccgtg

SEQ ID NO: 5288 - DNA, 197 bp, Homo sapiens
acctttttgaagaaatcatatggaacatgtgtcttccttcttcctggctgttataaaggaggagtatggcagaagaaccacaacttcccaactgtttggaaagctgcagctttcctttgctctaacaaaatttattgcaattaaaacactgcagcctcatcatcagatgtaattatagaaaattaactaaaaaaaaa

SEQ ID NO: 5289 - DNA, 360 bp, Homo sapiens
ataaagaaactgaggctcagagaggcgatgcaacttacctgaggctcagcaacgacagaatttgcacccagatctctaagactccaaggtcagtgttccgagagaagaagcacagtataataatatatggccccggtactgcggggtctccacggaagagaaaggacaatatggaaaatcttcattcaatacttaatttctcagtgcccacattccaaagcaggcacagaatgagctggacagacctcagcctgcacctccaccctgcttcttccagaaaatcacagaaataatatttcttggtaataaaataaaggcagaccctgccacttttccttccaaaaaaaaaccgcatccttt

SEQ ID NO: 5290 - DNA, 519 bp, Homo sapiens
  misc_feature 468, 501: n = A,T,C or G
accctgcaattgtcaatggggtttattggtctgaatctctaaacaaagtttttgtagataactttgaccgtgacccatctctcatatggcagtactttggaagtgcaaagggcttttttaggcagtatccggggattaaatgggaaccagatgagaatggagtcattgccttcgactgcaggaaccgaaaatggtacatccaggcagcaacttctccgaaagacgtggtcattttagttgacgtcagtggcagcatgaaaggactccgtctgactatcgcgaagcaaacagtctcatccattttggatacacttggggatgatgacttcttcaacataattgcttataatgaggagcttcactatgtggaaccttgcctgaatggaactttggtgcaagccgacaggacaaacaaagaggtaggggcagctcgggggagccattccaatcatgggacacccctgtctncctcataagtgattggttcacaaataaatctgncttatcaaaaaaaaagaa

SEQ ID NO: 5291 - DNA, 445 bp, Homo sapiens
  misc_feature 161, 357, 393, 399, 411: n = A,T,C or G
aaaaagtctgctgacccctggtatggatgtttacagaaaaagtctgctgaacctcagtatggatgctgaccccccggtatggacctccactgtactgagggctgctgtggggaccaatatgagctgagagctctgccaggcaccctacatgatatacctgnaagggagcgtccttctgcggcctgaacctgaagctcttcagagggacccatgctgggctctgaagaaagtgactcaccttggaggagcaagggcaggtcacattccatgatgagaaattctcacaccaccctccttcatatttgactcacatcatgcagcatggacttccactccagtaaatgagtcctcatttgngggcttaaaaatctttttgttacccagctatttggntcttgncaacgctacttnctgaataaaggtctttccctgatagcaaaaaaaa

SEQ ID NO: 5292 - DNA, 477 bp, Homo sapiens
  misc_feature 42, 48, 50, 60, 69, 80, 91, 97, 99, 102, 105, 112, 148, 161,163, 172, 191, 194, 195, 197, 209, 210, 224, 238, 243, 259,261, 264, 276, 282, 284, 286, 289, 301, 318, 328, 346, 369,375, 381, 419, 433, 444: n = A,T,C or G
aacaccaggcggaaaaatccattcctgactgcagtggtgaantggatncntggaatcccnagcaaggtnctggcgggcangtccttgttgngcccantntanctntgatggnggcgggagactcgctccctccacgggctccgcatangccagagcacccnantggcagacnaaggagggtgaaaccagcntgnngnggcctctcatanncgctctccctatgnacataaattgcatngaatnttagtaacacccattnanaanatgattgcgaancctttnancngangaataaactgangctaccagagattatgnttttccccangctatactgctggggggnaataaagccaggatactacccanatttgnccgacngcattactcatattcttttaccaggccccggtccaaangggggggcatggantttcgcatttnaatcaaggaaaaaaaatccttcaaaaatgggtt

SEQ ID NO: 5293 - DNA, 204 bp, Homo sapiens
ggaactgaacccaggagaaagacatatgattttcccaggatcacccaccaaggtgctccggactagagctcagcttgagtccctgccctggacattgtaccaggccctcaattaaagtcctggaagcttcccccaggctttcctctgagacctactggaagcgaaataatcctttaaaagttagttttctgacacaaaaaaaaa

SEQ ID NO: 5294 - DNA, 523 bp, Homo sapiens
  misc_feature 463: n = A,T,C or G
gtgatggttgaagctgtaacagccatcttcgactacaaaatggaagctgcatgctacaaatgacagaagacaagatcaaaagaacctgtgttcccagcaccacagaactgtccctatggaaatagacatgactgttacataagaaagaaatataccctactatgtttaagcctctgttattttagcatgtgttgtagcagtcgtatactaagtaactaatgagaaagaatattttgtgccctggtaaagatggatacttctatatgttatgagaacaatttgatgaggtaatcgtaatttagtagaataatatcaaatattaatgtcaaatgactagtttggcattgccacatagtaattgttgggcaagttattaacctgtggctcaatttcctcactggtagaataacaataacagacaatggtactagtgggcaacggtttactgaacatgtaacttggntcaacgccacacattatttggaataagtagaataaaagaggcctgagtaaatataaccta

SEQ ID NO: 5295 - DNA, 273 bp, Homo sapiens
  misc_feature 22, 33: n = A,T,C or G
agataaagccttcaaataaganagaattgaganagagttgggatggcttgctcagggctgcagctggtataaagctgtctctgttctatggctggaggacacagaggagagcacacagcaacacctgcactgcagtatctcctgctaatatcatacttcataatgagaaaccacatactttctcctttaagatggaaaacaaagaaaggatgtcttctctcatcagtcctattcagcatgtactaaaagtcctactttgtgcaaaaaaaaaaa

SEQ ID NO: 5296 - DNA, 287 bp, Homo sapiens
  misc_feature 148, 152, 168, 177, 185, 191, 194, 196, 197, 201, 204, 207,211, 213, 217, 220, 221, 222, 230, 231, 232, 237, 238, 239,253, 254, 258: n = A,T,C or G
caagcttggaggccaactggtgaaatgggaacctaccaagatggcgggacaagggagcatggatccaagtcaccagatggaggacagactccatctaatctgcatcaggctttattcaactgatgaggaagggatgcttggtactacngcangcatcttgtgaccgancgggctggnggaccacnctaacnccntnnatanggnagngaananatgngannngaacatgnnnttttnnnatagatcacccatnnattnactaactatggaaccaccctgcctttttt

SEQ ID NO: 5297 - DNA, 102 bp, Homo sapiens
  misc_feature 32, 40, 55, 58, 75: n = A,T,C or G
tactaaatatacaaaaactacctggccgtggnggcgcagntcctatagttgcatntantcagagaaactgattgnagccctaatcgcttgaacctgggaggc

SEQ ID NO: 5298 - DNA, 557 bp, Homo sapiens
ttctagaaaactggtgtcagttacaaaggccttgaggaactccatgaaattgtcaactgcttgaatgaggatccctgaatgttctggagacaacaacataaaagcagagaaacaggtccatattcggtactcactgaatgcttgttgatgagattacattcttaagaaagatttctaactccaaatgctgaaaattcaaatctgtcaagagcggctgttgacccagaatggttcaattaactggaactccagcccttgaacattctgggtagccagaaagaattctctctgggaaaatacagggccagctcacaacaagcgtgacttcaccctgtgccccccaacactgcaggataaggacatgaagccaagtacaaatgtcacacatcttcagggagaaccaattttattctgaagttttttgggaggatgaaaattaccaacaagaatttccctcgttctaagatctgcattttccccatattttaacatttaatatctaattttaacattttaacatctaatgagatcatgttttttgcttctcaaaaaaagaa

SEQ ID NO: 5299 - DNA, 496 bp, Homo sapiens
  misc_feature 18, 30, 33, 45, 47, 49, 86, 105, 164, 174, 175, 193, 211,399: n = A,T,C or G
ttttttaaaagttcccangaaaaaactttnganagaaaacaaggntncnttttggcttttttcggtcccggccccccaaagggccnttggggaaagttgggttanccttggggccaaccaaaaattctttttggaacttccaacttgggcaaacccttcttggnccttccccannggttttcaaaagccaaantttcttccttggcccttncgggaccttcccttggaagttaaggccttggcggaatggccccaacccaacccccttgggcttaaaactttttttttggtaatttttttgggtaagaaagaaatggggggatggggtgggtttttcaacccattattttgggccccaaggggcttgggttccttcaaaaaacttcccttaaaccttcnaaaggtgggaatcccaactccccttcaagccttccccaaaaagtgggcttaaggggaatttaccaagggccggttggaagcccacccattgccccac

SEQ ID NO: 5300 - DNA, 376 bp, Homo sapiens
  misc_feature 25, 30, 48, 53, 56, 84, 96: n = A,T,C or G
gagctggggagctcctgctttattnctganctggtttttaccgggaanatgcnctntgaatgccaatttaaaaattacctggcnccttgagcaggngggtaggcaatggatgccataaccatcttgggacccacaagagaagggatagcagaaggtccacacttcccaacacaagagctctgcctgccgtttgcctgacagaagattccattattcttaaacaagatggaaggcttgggcactgaccacctcttgaaactggagaaaatgggcttctctaaggaagaaaattgggaagaattcctctttggccaccagaatggatttgagaaagaaaaggatgcagattttggcaggaaaattgcacagcctctga

SEQ ID NO: 5301 - DNA, 180 bp, Homo sapiens
  misc_feature 144: n = A,T,C or G
gaaagaagcagaagcagaggtagaaaagggaaatggaaaccttacccaacatcaagaagctgtgaaatgatagagggtgatattttctcaaagactcatgctgacttaagcttctggaaccttgtgggtggatgtgctaaattnaagacttgtatttaaattttctgcacaaaaaaaaaa

SEQ ID NO: 5302 - DNA, 361 bp, Homo sapiens
gtcgtcagaggacacgtgcaagcatttctgtagaagatatacctaaatggaaaagtgcgggttcgtggataagcacattcaacattgtgagtagacaatgacaaatgatcttctcaagtaagtgtacaaattacactctctccagccgttcatgggcgttcccatgctccatctcttcaccaatgcctggcaagatcatttagactatgatcatttagactgtatcacttttggccaagagctggggacacagtggcgaataagacacaggcctatcctcatgaagcttatattaatgggggacaaaggataataatcacataagcaaacaaataaatacatgagatgatgctaataaaaa

SEQ ID NO: 5303 - DNA, 554 bp, Homo sapiens
  misc_feature 90, 99, 148, 150, 158, 167, 233, 299, 319, 342, 376, 419,460: n = A,T,C or G
cgtttaccttttttcttcctagggggaagcctaggggaagctagccctttagctcccccaccaccttttcccctagtagtgacctacctncttcacctntctccactagtggaaaagagccacacacatacacaataggggagcaagngnacacaagntagggatgnaagtaggcaaagagtacacaaagagtcacacaagagtaggaagttaccacattaggaggtcttcangcaagcttcaagccagttaagtggaaaggtgacacaggaagcacacacaaaggaaggaaatgggtngcccaaggtgcccaccaacnaaggaaaagtacgccccaagggnaaaaacccccaccaagccaagccctttttggggnggttacctttcccttccaagaggggggaaggggggggggccanaaggccattaaaaggaaattaaaccaagggggaaggttttnaaaaaaaattcccttggcttaaaaaccttaattttttcttttcggccaaaaaagccttggtgattttttaactttttttcttggaaaaggttgg

SEQ ID NO: 5304 - DNA, 351 bp, Homo sapiens
  misc_feature 26, 52, 56, 94, 110, 135, 138, 152, 185, 245, 279, 301, 312: n = A,T,C or G
ttcctgttctccccccaaaaaattcnccaccttccccaccaaaccaaccggnggcnccttttccccccttaattcacccctttaggtagaggtngggggccaaaaccttngggaaggttccccaacctttggttnggnggggttccccaatngggggggccccccccccccttttttcttttttnggaacctttccccccccaaggcctttccccaaggttccccccccttaaggccaaaaaggnaaccccaaggcccttgggggaaattccttgggcnttccttttttgggggaaatttnggccccaaggnggaaattcctttggcccccccaaccggtttcctttccaa

SEQ ID NO: 5305 - DNA, 156 bp, Homo sapiens
  misc_feature 93, 114: n = A,T,C or G
ttccggaaatgctacattaaaattttaaaaaataaaattgtgattgttagaggtagaaatattcacaattagaaatcgcaacctcaattcaanagcttatcttttatatgaagntataaaatataggtcataaatcaaataagtgtgtttcaaaag

SEQ ID NO: 5306 - DNA, 366 bp, Homo sapiens
aattaaggcagagtcactgtaattatttctaataccaattccaaaatagtgactcttggacaatagtgcaattatatggaattatggctggttataagcctgtagctattcagacatatcctatacttggtgaaaaaatcacccaagatacactgtactggaacaactataagacccctgttcagattaaggaatttggtgcagtttcaaaagtagacttttctcctcagcctccatataattatgctgtcacagcttcctcaagaattcacatttatggccgatactcccaagaacctataaaaaccttttctcgatttaaagacacagcatactgtgctacttttcgacaagatggtagattgc

SEQ ID NO: 5307 - DNA, 104 bp, Homo sapiens
ggcagccccatgaatatgaagatacttggaaagtctttactacagagcatgatttcaggaatgatgaaacaataaacgagaatctggtattaaaaggaaaaaaa

SEQ ID NO: 5308 - DNA, 168 bp, Homo sapiens
ctaaggagatcaactacagattcactaaataaaggcttcaactgaagacaacacctcaacttcagcaagaatacagtagcttggtatttaccatggagaaatattatggggtctgtactatttctcttaattttatttaaaaactgaatgtgtctgtaaaaaaaaaaa

SEQ ID NO: 5309 - DNA, 361 bp, Homo sapiens
  misc_feature 101, 108, 109, 165, 183, 207, 213, 234, 239, 242, 253, 254,262, 265, 267, 272, 278, 282, 327: n = A,T,C or G
ggagggcaggggaaatggtcagggccttcttgaagccccaaagcccaaagccattcggcattccccttggtggaactttggcaccggtattaccaccccangatgggnncttggaaagtaaacttgggaaggaaatcaccaaaaaggaaagtggaaaaaaggggncccttggccccggccttnaaacttggaatggaacattttcanccattngggggggaatttgggtccttnggccnccntttaaattggnnggtgggantananccttngggggnaaanttttctttttttcttgggggtttaaaaaaaaactccccccacatngtggcgacccttttttggaaacccccgggccctt

SEQ ID NO: 5310 - DNA, 376 bp, Homo sapiens
gcctcaggtttcagagggatgctgacagatgctctaccatctacccaggcttgaacagtgaagaggatgaaacagtatctgctcatctcaatagagaagacagaagttccctgattccatttgaggctcctcacctgtgagaacagtcttcttttgagttcctggaactgcagccatagtacctacctctccaactgaatggctgaaaggctgtatctgctcagctgaagacaaccatcaaggcattttttcccaaaaagcacagaaggagattcaatcatcaaatgagaggcctcactcacctctgcatattggcccttatcctttgaaagagaataaagtaacagctgctattctttcagccaagaaagggggg

SEQ ID NO: 5311 - DNA, 111 bp, Homo sapiens
  misc_feature 93: n = A,T,C or G
caagcttggaggccaactggtgaaatgggaacctaccaagatggcgggacaagggagcatggatccaagtcaccagatggaggacagactccntctaattctggcttcagg

SEQ ID NO: 5312 - DNA, 307 bp, Homo sapiens
ggtggattgctactacagttttttgagaggtggtccaagctcttcaaagagaaaatggaaccaaaatgaaaccaagactatcctgatattacaaagcatctctctggctacaaagtgtaacaaggacttgacacacatgggcacatggtggcaaagatggaccaaggcaacccttgcttggcattggagactcaggttggatctgctgggggtctgactgaaccagaaataaaagcaaataaaccactgttcacttgctgctggctaatttattcttattcagatgacttcaggaaagaaaaaagaa

SEQ ID NO: 5313 - DNA, 195 bp, Homo sapiens
caaaagaaagaacaacaacgaaaagatgtatttcatgcctcccattttccacttttttctcatttggaccactgcaaaaggtgacagaaccttcaagctgttgggaagaaagcagaaaaaagacttaacacagatcttctggaaatgatagaggtcactgatgctcaggcttctaacctgctagaataaaaaaaa

SEQ ID NO: 5314 - DNA, 345 bp, Homo sapiens
  misc_feature 268: n = A,T,C or G
gtggggtctttcaaggtcctgccagccagaggtgcccatgggccgccgcggacaggctgtgggcatctccatgtccacttgagagcctgctgcacactgtccaccccgggcccaggaggagacgaaaggccacatcctcacctccctcacggcccagctccgtgacctccctcatcagaacccggaatctggactccaacctgtgctgctgcatttcctctccccccacagccccaaacacaagatccatgaagcaagagtcacaccnttgtgtcccccagagtcccagcacactgcacatggcaggtgctcaataaatgtttgctgaatgcccaaaaaaaaaaa

SEQ ID NO: 5315 - DNA, 158 bp, Homo sapiens
  misc_feature 118, 131: n = A,T,C or G
gccttcatatcttggagctggtggccttgctgttgttcattccagtcataagggctcctcctggtgctgcaagccataaaggattttacaggtcctgacacagccaccaaaggggcgnctttatcttctgntggagtaggaagcaacacctttattgg

SEQ ID NO: 5316 - DNA, 380 bp, Homo sapiens
acctgaggcacctaggcctgtgctgggtaaacctcagatgcagaaaggcctggaaggagaaaggcgtgttcgttttcaggagagacctggaactcgagcagatgccaggggaatcacagcacagcttgacgcagcgacagtccaaggggttcgcattctgcaagagcatgctgggcagagatggattttactcaccagaaactgaagtgacttacttgcagccatgatccggaagagaagcttcatgatgtggttttatgaggatcttgtatctccctcttacccagaagtaaacaccttcacttgaccttctgcggctccatccactgtcacacacgtaaacaccccgtccagtaatacactccaacccaaatgcagga

SEQ ID NO: 5317 - DNA, 194 bp, Homo sapiens
gcaaaatgatcataattcagatcctgagttaagacacagagaaggccaggaagattaacaacgaaggctccaaggaggagatgaagaaaagtggagacacttactgttcttcttagcttataaacagggcatgacaacttttcttcttgtaataaatcttatgatttttcctatgtattcccataaaaaaaaaa

SEQ ID NO: 5318 - DNA, 378 bp, Homo sapiens
ggttacccggcaagtttacagagagggaaggagagcagaatatttctgcccagaagttgcatcaagatgaccaagttgccatgaataaatcatcacagaattttgaactggaaaacagaaacaaaagcattgaaagctaaaatgctcgcgtaatcctttcttgattctgtgtatcacccttggagaagtctgcattgtctcttgctgtaggatgactgcatgggacacacttagtgactcttctgaagaagctttctggtctgctttccttttcccatggtttttaaagagaatctagctttcttgcccctgccttctgctaaaataaatgttaaaaaaaaactggaaaaattagtgacctacagttttccagggatt

SEQ ID NO: 5319 - DNA, 277 bp, Homo sapiens
ggttgtatagtcttccaatgtctgcaattcccttaatggccattagagtcgcggacgagaaaaaaactcttcagaaaacggtgtgaataatgggagcaagagaagaagttcctggttatagcccactcatatatttttgaaatataggtcagatctagaggaaatgaaagaaacttcctgttgaattttcatttatagtatgtgtctggaaatctctaaatgtaatttcttggtgtaaaataaactgcagaaatctgggatgtgtcaaaaaaaaaaa

SEQ ID NO: 5320 - DNA, 291 bp, Homo sapiens
  misc_feature 34, 40, 51, 54, 64, 74, 82, 100, 126, 158, 182, 183, 184,192: n = A,T,C or G
tgaggatatcctgcctcaactctcctgagatggngggatnacatacatgcnctnccatgcctgnattcacagancttaaaanaaacctgcctggagctcnggtagtactgggactacacgcataanccactgcacccagcctggatgatatctttganccatgaatccacctgtggactggnnngccttccncctcttatgatttaggcttggctaaatgatttgctttggcctaagagatgtcagcaaacatgatgtgagttcagtaagtgtttgcacattggcacattg

SEQ ID NO: 5321 - DNA, 366 bp, Homo sapiens
caggaaaagaaagacaagaggaacaaaacgacaacttgatgtgtgggagcccccatcagagccgttagtggaaatggcccctgagcaccggagcaatgttttcgacatcccaggtgctttggagtcttcgcggtgtacgggaccttaaagctgagctggctgtattgcctcgtggctgctccagtcctgtgctagacctctcgctgggtctcggggttctcagcgcctgttcagaaagcctggcaatgtttgcctgggaggaaaagctccataaatacacgctgaagacacgactctgtgggtccgtcagatgaaacacagcatcacccagcatccaccgaggagcccagtgctcatgggcaccct

SEQ ID NO: 5322 - DNA, 163 bp, Homo sapiens
agtgacaagtgacgacgaaagtaagacacgaatgccgggttgagttgctgaaacgctgcccacggaaggctatgcatcacctacccccacagtgtgtagggagccacaaggtgatggaacgggctgaataaacacgaatcgttttattgctgaaaaaaaaaaa

SEQ ID NO: 5323 - DNA, 463 bp, Homo sapiens
  misc_feature 41, 62, 79, 85, 96, 137, 168, 230, 245, 257, 274, 299, 329,363: n = A,T,C or G
actgggggggggctctccaaggagtccaagttcaaccaagnatcagcccctctcaagagccngcctttgtagagccagnaccaanacagcctcagngctcacagttccaccattccaagagaggcaggaagcctagnggtaggggaaggttcccaaacctagcagagngaggccctcagccagcctaggaccccccttcttccccccataggttcaggttcccgcccacnccggacccccccctngggccacccctnggggattccaacccctnggggattttccaaggccccaaggtnggccggggaattttttttccccaattaatnaaaattccccaagggggaccaaaaggggccccanaaggccttaattaaaaggaaaaaatggggaaggttccaaaaccaaggaaaaaaccttccggggcttaattcaaattttggggaaggggccggttcaaatt

SEQ ID NO: 5324 - DNA, 189 bp, Homo sapiens
  misc_feature 37, 41, 43, 45, 58, 59, 94, 106, 112, 114, 140, 141, 145,168: n = A,T,C or G
gccccaacccaaggaaaacactggttgggggcaaacncctngngngaattcaatcacnnttgggaaatctgcaaaagtcgccaaataaaagtcnggggaaattttntcttcncncatttagtttagaggtacaccaaatnngaanccaaaagggggcgccaaaaaagncttttttttaaaaataaaaaa

SEQ ID NO: 5325 - DNA, 439 bp, Homo sapiens
  misc_feature 327: n = A,T,C or G
aggctcagacacagaacaaatgcatgcactggtgttaaatgcagagaagagaaggtgttatctcctgaaatggattctgctttcttcggggttagaaggcctcctttttgaactgacctcaaccctgctgattttgtctcctttcctggccatgaggatcagaaatcagcaatgatttcataagtaacttctcatgaaaccacataccgcagcgtgagtcacacatgtagctctgtgcacctgtaggcgtatatgccattctttttaaatctgccaggaatgtgatgatcaactggacccagtttgcctgggattttccttatttgnactgaaaggcttggtatcctgggaaatccctcacttccaggcatactggtgtgattgaccatcccacccaggaaatgaggaagaagcaaggagtcctggagctctaccatcc

SEQ ID NO: 5326 - DNA, 399 bp, Homo sapiens
  misc_feature 72, 84, 87, 90, 104, 117, 123, 141, 143, 176, 201, 211, 225,235, 257, 259, 275, 277, 330: n = A,T,C or G
tcccttccttcttttcttttccacagtaggtttcttctttaggccctttcccaccccttcccaccccatagnggggataggacnacnacnccacatgtaaaagnggctctctccacnccaagnataggtagagaggccccntntaggaccccttagaggaccttttccccaaggcnccttctccaaggaaaccttataagnggaaggaaanacgccacaccttcnccaaaaggtnttccttttaatataggggaagntnaatgtattatccatgngngggttaaccttggggaaggggggggccttccaaccaaggttagttttaaaagngggaagggaaaaggaaccttccccggggccaaggccccttctttgggataaaaggtaaaaaaggaaaaa

SEQ ID NO: 5327 - DNA, 108 bp, Homo sapiens
  misc_feature 28, 30, 32, 46, 52, 56, 60, 65, 88: n = A,T,C or G
gtgatgaaactgagggtggaaggttgantnanttggcccaaaatcntggggntggnaagngaaanatgaattctaatccaggtcttgnggactccaaaactcacgccc

SEQ ID NO: 5328 - DNA, 258 bp, Homo sapiens
  misc_feature 28, 30, 31, 63, 65, 69, 80, 107, 109, 133, 141, 146, 148,149, 156, 158, 185, 189, 227, 239: n = A,T,C or G
accgccggccatttcttggggggcacgngnnggaatttgggggcaaccctgcaaaattgaaanantagnattcaagggcncggcccttaaaaagaacttcaagttangnccttcccctgggacacttgccccnttttatanaaccngnnttttgcngnataaaggggacccccggggacgggttntcgnggcccgggtttgggcacacccccattctggtaaacacnttatttccccgnatgactgaatttttatgga

SEQ ID NO: 5329 - DNA, 132 bp, Homo sapiens
  misc_feature 37, 51, 60, 75, 85, 89, 114, 115: n = A,T,C or G
cctggcctgccttaagcgaaagcacctactcccttgnctgtgtgtcctggnccaatgccngaaggctataaaagngataattganacanatcttcttggatgctgacaggaatnntagtgtgaaaggacaaa

SEQ ID NO: 5330 - DNA, 529 bp, Homo sapiens
  misc_feature 17, 41, 55, 67, 74, 93, 115, 117, 133, 149, 184, 205, 211,213, 214, 218, 223, 228, 232, 241, 244, 247, 257, 264, 271,278, 280, 291, 305, 309, 325, 326, 327, 331, 346, 367, 376,389, 410, 416, 438, 441, 444, 458, 463, 483, 491, 494: n = A,T,C or G
  misc_feature 501, 511: n = A,T,C or G
agctaccttgcatttangttccctgacacttgaagttccgnaactggcgtactancagccctggggnggggtcngggctttggctgactcggnaaatttggtaaagggggcaaantngccaattttcccattnggcaagggaaacgaangtggtacacatgtgcagtcacggcgaggggggtcnctcggggcttttcataggaancaaatnannggtnaaccngggtncggntggggggcnttntcnaggccttggnaaggggnaagggangggcctnangggtccagggngaaggattgttgcnaagnaactataatatccggnnngacnttcacctcgaaaaangaactgtaccaaaaaacgggnattgcaaancaagtcccctttnggcgctctcccaccggaaacnaatggnggggggacccttttggggcccnttntgngaaaatagtgctcncgctnggtgaaaataaccactggcncctaaacncanttgtttnaaggtataantccccaattatgttctcc

SEQ ID NO: 5331 - DNA, 329 bp, Homo sapiens
gtgaacacggcttaagagatgacccaaatggagcttccctgtagaacaagacctttccaacctctgcttgaacccttctggtaacagagaactcactacgttacaaagcctcatcctctagagtcagatcctaaggaaaggactgatcacgattttgagaggtctgatggaaatggttttctaaacttgaaaggcttaaatgaatataaaatttttgccttaattatattttctcatacaagtccagaagcatctgcagtttcttgcagccacaagcaagaggtttgaatttatgtatactccatttcttctggctgtggaacaggcca

SEQ ID NO: 5332 - DNA, 101 bp, Homo sapiens
  misc_feature 44: n = A,T,C or G
ggcagccccatgaatatgaagatacttggaaagtctttactacngagcatgatttcaggaatgatgaaacaataaacgagaatctggtattaaaaaaaaaa

SEQ ID NO: 5333 - DNA, 269 bp, Homo sapiens
  misc_feature 70, 206, 221, 245, 247, 251: n = A,T,C or G
aaaggggggatcaaatggagtttctttcattcaagctcttaaaaggtcttgtacctggcttgcttcttgntaccatctccttggtttaaataataattttggggaaaaaccaggaaccaaaaccacttatggggcaggaaaaggtcaccaccctacccattgcccgggcttggcttggaagaagggaatttggaaattggaggttntttgccaggcctcancggtggggaattaaaaggggcccntngggncccccccaattaaacccc

SEQ ID NO: 5334 - DNA, 229 bp, Homo sapiens
gagatcatctaaagcagaagagaaagctgcatgaaagtgtactgagagccagttactacaggcggacgccacgccaggctaggactagggccgccggcagagcctgcactctccactcactcccacccttggggcagaggccgaattatggaacattctgtataaaggaaaactgtcttattctaaggatgacaaacaaaataaacatatttaaatattaaaaaaaaaa

SEQ ID NO: 5335 - DNA, 378 bp, Homo sapiens
  misc_feature 128, 140, 142, 146, 236, 241, 260, 345: n = A,T,C or G
gtgtgcttcctgaggttgacttcagatcgatgtggatgtacacttggaccaagttctacattaggaacactttaagtgattgatctagaggtgcccctgctgtgaaaatggaaagaaatgtaatgttntggtcatgggananctancacttccacaataccagcacagtgagagtcatccttcatttatttcccgccttcccctttttcggatgttgatgagacattagtatggcncgaancctgtttgctccttgctgnatttattttgttaagattagagttgctaagatacggcagttatttcaaattgtaaccactgatgccagtggtcataaaataaggngctgaaattcctttatttgctaacgctaatcca

SEQ ID NO: 5336 - DNA, 152 bp, Homo sapiens
  misc_feature 55, 76, 122, 129: n = A,T,C or G
gagagagatggaaccaaaaaagaggtaatgcacaagccattggggatttccccgnaagcccctctccttggagagngctcttcttgtagctctggggggagtatgcagccaccttaacaagnaaaaagngctaaacctggtgtcaaaagggg

SEQ ID NO: 5337 - DNA, 190 bp, Homo sapiens
ccggagcagatgtgtattaacccaattggacatccgtgaagacaccaaggcccagagagatcataagaacctatagaagtttccatgactggtggatgtgacagtcaagccgcagtttgtataatacacagccataatcttatctaccacttttaaaaattaaacatagatgaaatgttaaaaaaaaaaa

SEQ ID NO: 5338 - DNA, 425 bp, Homo sapiens
  misc_feature 30, 41, 45, 47, 49, 50, 51, 53, 61, 74, 76, 91, 93, 96, 105,110, 112, 119, 125, 126, 128, 129, 130, 134, 144, 148, 151,161, 167, 176, 222, 224, 246, 248, 254, 266, 268, 320, 325,354, 405: n = A,T,C or G
tctgaagtggcctcgctgggcataaaaaanggcgcaacccnccangnannncnatttaaanggcccgccgaatncnaattcttggagggcncnccntttaaatgnccggngnggccaanccacgnntnnnactnaaccaggggnaccnggnttcaaaaggngggggnactacccanccttttgagcaaagttcagcctaggttaaagtccaagctgcaattngngcctcgcttcccatttaaaatngngcagcngccctccgtagngnaaattcagggatcccggccgccgcccatttaaaaatagagcccgcttattgngccanattcttttagcgttttttaccccttgggnaaagcaaattacttcattaaaagccaccctcttgtttattttaccccccanatcttcacaaaggaaaaaaa

SEQ ID NO: 5339 - DNA, 212 bp, Homo sapiens
  misc_feature 21, 22, 51, 83, 90, 97, 98, 101, 110, 116, 118, 119, 126,127, 131, 142, 143, 153, 168, 190: n = A,T,C or G
tgatggggttttgcttgcagnntaaatactgcaacatccacaacggtttgntgatgaaggaatttttttctcgagcaaaagtnataaacncaatgannacntggcttgcngggggngnnccataannctcncatgctaatgnnactgactaangaactaacgctcatntgctcaaaggcatttattttcngtgatcaagaacccatatcttg

SEQ ID NO: 5340 - DNA, 231 bp, Homo sapiens
  misc_feature 39, 62, 67, 73, 124, 140, 144, 161, 190, 202, 206: n = A,T,C or G
ggacgttcttggggggggaggctaccttggggcattaanaggtccagaaaaccttggagaanggagnaaaaanggggattggccttagaagccaaattaggcctggcctcaaggattgggaacnaaggcttaaatttaanttangcctttaaacccattgnattcaaaaacccccggaaagccccattgntcctgggggagnaggnggggtccccccttaaaaaaaaacca

SEQ ID NO: 5341 - DNA, 201 bp, Homo sapiens
  misc_feature 22, 23, 34, 49, 64, 71, 83, 98, 124, 138: n = A,T,C or G
tatcttgacgaatcacattacnncccatctaganatggaatgcctggcnttgttagggcacaantggggtntccaagctgatnatttgtccctggttnaagggacttctggatacacccagggngataggcccactangaaaaaacctggaggcacagaggggaataccccggtggtacttccacaaactttttttttcaa

SEQ ID NO: 5342 - DNA, 244 bp, Homo sapiens
  misc_feature 25, 48, 54, 70, 153, 183, 184, 193, 198, 225: n = A,T,C or G
caagccttaggccaggaatggtgcnagaaagtttaaaggtggtggggntttcantgccagaaaacctttnccaaaatggggattttcaaaggaagccccaaaagcccctttcaaagaaaagttggggtggtcattttggtccaccttttgggnaaataatgtttttggtattttaaattaccnngggtaaggnaatantggtttaaattaaaacccattatttcntttattccaaaaaaaaaaa

SEQ ID NO: 5343 - DNA, 196 bp, Homo sapiens
  misc_feature 27, 33, 35, 36, 54, 98, 101, 118, 124, 143, 146, 150, 153,164: n = A,T,C or G
tgtgaggaggatctctgattcccgccntgacanannaactggaaatgaactttncttcttaccataaacagctattaaactgggagaaaatatccacnacncatatgtctcacaaganacttgntccagaattcttaaagaangcnttcnatnattaaatgacnaaaattcccatttaaaaataccaaaaaaaaaa

SEQ ID NO: 5344 - DNA, 286 bp, Homo sapiens
  misc_feature 256: n = A,T,C or G
gccacctggctttcccacacatcaacctcgtgctcacaccccactctggagaccaccagcttcgaggcaaaaagagagaacgacgtacaatggggtaaagcctccatgtgtaggcgatgttgtgaggaaagggtggccggttggaagggaacatttttaaattgaggttattgtttatattttctcataaacagcttctctgtggccacaagttatttcggtcattttcacaggctttttcccccctttcccaagnaatttaattcccttggggggaaaaaaaaaa

SEQ ID NO: 5345 - DNA, 360 bp, Homo sapiens
  misc_feature 174, 175, 281: n = A,T,C or G
gcagaggaaatgtaggaagcacttagacaaacatgtgcaatcttcaagagagttcccttgacattttgctgacttttacaactgtgatcctgagaggagaaaaggagtttttgttcacaggtggactcactgaaacaccagccttcagggaagcccatgggaggtctttccttnncgggtcccatttgcctagcaggagttccctaatgggcctacatcacctcaggcctaggccggcttgtggcttgcttgccatccagtagcaaggtcacgtgggttgnggcatcattagttacaagctgcaatacaaaataatagtaacaaaggagatgggggaatttccacatgcatcacaggtag

SEQ ID NO: 5346 - DNA, 394 bp, Homo sapiens
  misc_feature 344: n = A,T,C or G
gcgacaccgtgttgggtccccgaccttctatgctgagcagcttaggggagggtaagttgccccaccacacctggtgcagcattcaacaagacacccatccctttaattattcagccaaatgatttatgaggcttggcagcaaagacttggcagactggtttaaattcaaaggatccaacctacaggtattttgaaaaccttggccacatctgcaatgtgtactgtttcttttgggagaggaaagaagagaaagggagaagatgtgacctgcctgacaggaagacaagacccaactagatggaacatgtctcccactccctccccaccctgtcatttaacaatgntctggctgactttcttcctacgaaaagcaatcagatagagttttaaagat

SEQ ID NO: 5347 - DNA, 101 bp, Homo sapiens
ggcagccccatgaatatgaagatacttggaaagtctttactacagagcatgatttcaggaatgatgagacaataaacgagaatctggtattaaaaaaaaaa

SEQ ID NO: 5348 - DNA, 207 bp, Homo sapiens
  misc_feature 23, 68, 102, 175: n = A,T,C or G
ataaaactggatgtgcgagttcnaaggtctacattttgcaatacgagagaacagctgaattgaactanggagacatgaatttgtcatgaataaatcttgcanaaggactgtattcaaactatggagatatgatatacagtgaatatatttgtggttagcaaaatgatgttacagntttatgataataaatttcttacaaaaaaaaaa

SEQ ID NO: 5349 - DNA, 150 bp, Homo sapiens
gagttggtccaccagtggaaacatgctgaatgaattatccccctgagaaaagcctcaagaatgacacagaaaattaagatgctcttaattaaaatgaatgtgtaccagaatgataataattaaatttcatcagtctgttaaaaaaaaaaa

SEQ ID NO: 5350 - DNA, 226 bp, Homo sapiens
gtcccaccttacctggaagaaccatgaagatcaaatagaaggtccttgtgcatgaagctcagcggaaaaaagctcgggtatgaggcaggggaaatgtagccgaacaaagcactgggaagaacagtcactttgcaccttttgtatcaaaaggaagcaggtctagggtggatagaagacattcatcaaaactgtgaaagccaactctttattacttgaaaaaaaaaaa

SEQ ID NO: 5351 - DNA, 135 bp, Homo sapiens
  misc_feature 37, 51, 56, 73, 74, 86, 90, 93, 114: n = A,T,C or G
acccttgggtgtagactacctggcattaaggtcaagnaactggagggaacngggangcccttctccacaacanntctggggatgcncctnggnccttaccaagcatgggcaacntacaactggctctcacctgat

SEQ ID NO: 5352 - DNA, 375 bp, Homo sapiens
gtttcttcctgaacgcgcctcagcgattttaaatcgtatgcagaatattcaatttgaagcagtggttggccacaaaatcaaaatgaaatgaataaataagctccagccagagatgtatgcatgataatgatatgaatagtttcgaatcaatgctgcaaagctttatttcacattttttcagtcctgataatattaaaaacattggtttggcactagcagcagtcaaacgaacaagattaattacctgtcttcctgtttctcaagaatatttacgtagtttttcataggtctgtttttcctttcatgcctcttaaaaacttctgtgcttacataaacatacttaaaaggttttctttaagatattttatttttcca

SEQ ID NO: 5353 - DNA, 348 bp, Homo sapiens
  misc_feature 35, 49, 54, 62, 63, 65, 78, 79, 80, 90, 111, 118, 235, 248,310, 325: n = A,T,C or G
ggcgcgccggatccgaattcctcgagggcgcgccntttaaatggccagngaggncaattcanntngtgacttaaccannntgaacaccgntttatgaaggtggggactccncaacctntttgagcaaggttcagcctggttaagtccaagctgaaattggggcctcgctggccatttaaatgggcggccgccctcgagggaaattcaggtatccgagcagcgccatttaaaatgngccgctctagtancatatctctattgctagattgttaccctggggaaagaaaaatactcataaagccacctctgntgtattttacccccnaatctttcacaaagggaaaaaaa

SEQ ID NO: 5354 - DNA, 144 bp, Homo sapiens
  misc_feature 25, 91, 104, 107, 110, 114, 118, 119, 120, 123: n = A,T,C or G
acacaacaccatgcggaaaaatccnttcctgactgcaactggtgatactggatgcatggaatccccagcaaggtcctggctaggcacagtncttgttgggcccnatnaancaangatnnnggncggtagactcactccctccac

SEQ ID NO: 5355 - DNA, 170 bp, Homo sapiens
  misc_feature 105, 119, 130, 147, 148: n = A,T,C or G
cttccctcaacccctcaaagcagcaagatttatgcaagcctcctgtgacagcagagcttctgtcccatcagtagccttatcaaatctgtcctatagccccatcanaactggacgaacanctggcttttcnaggtattaagaaccccnntttaaaaagggccctggtggat

SEQ ID NO: 5356 - DNA, 249 bp, Homo sapiens
  misc_feature 29, 44, 62, 78, 120, 134, 139, 142, 144, 176, 177, 180, 197,202, 204, 216, 226, 233: n = A,T,C or G
taaggtgggggactccccaccctttttgngcaggtttcagcctnggttaagtccaagctganttggggcctcgcttgnccattttaaaattgggcggcgccctcgaggggaattcggggntcccggcgccgccntttanaantngggcccgttttggggccaaattcttttgtgtnnccnttacctttggggagaanaaatntnctcattaaaccncactcttttnttttttntcccccattttttttc

SEQ ID NO: 5357 - DNA, 265 bp, Homo sapiens
  misc_feature 18, 19, 26, 41, 42, 59, 76, 78, 135, 161, 168, 183, 194,224, 236: n = A,T,C or G
ttaaaacccgctttcaannaaagttnggggaaaacttcccnnaaccctttttttggaancaaaggtttcaagcctngngtttaaaagtcccaaaagcctttaaaatttgggcccttcgccctttgcccatttttnaaaattgggccgccgccccttcgaangggaaantttcggggattcccnggcgccgccanttttaaaaattgggccccgcttttttgggncccaaaatttcnttttttggcgtttttttttaacccttggg

SEQ ID NO: 5358 - DNA, 579 bp, Homo sapiens
  misc_feature 517, 556: n = A,T,C or G
atcatttccagagacgatggtgatattggaaggagacgattacccatctctagtcctgacccttcactcaagccccactgctgcctcaaacaatccatggccatggcacctcaaacctctcctttgcatcactgtcagagctgtccagatgggttctgcttggttggtggattcgcaggccttggactgtggggctgactcgagataatttccatacgccactgagcatttttactgggaagcgtttctttccttctcctggatgatggtgttatcggacttgtatagattaggagggagaccttaggtttcagaatcagactgaccttaattcaagtccaagctacccactagtattgggcaaattattgtactcagagtctcataacacacaactcacaaatatgttagcaaaaattagatacacgtagataatgccacaggaaacgtggcacataggaagcattaaataaattttttctcttctattaaaaaagaaatgttggtctggttacgnttacttatattttgcatttttttctctaaacttacatgngggggcagaggggttccaaccga

SEQ ID NO: 5359 - DNA, 354 bp, Homo sapiens
cctgtgttgaaatctccctgaggatgactcaccatgccttttcccaacatcaggcccaggaagccacggactttcccatgtcatcactgacttgcaagcctggggcaaaaccacagtccacccagcacagaacttggttctgcgaccagaaccaaagatgaacttgtaccctaggaagatgtggtcttctaagcctgacaaaggacgccaattttccccattcctctctcttaattcataatagaagggtttggttaattacacctgggataatgaataactaaaaatgtgttcttcgctacgtaaacagaacacattctctattcatttacagttaacatttcaactaaattt

SEQ ID NO: 5360 - DNA, 247 bp, Homo sapiens
  misc_feature 29, 40, 61, 64, 78, 81, 91, 101, 113, 153, 156, 161, 201,209, 223: n = A,T,C or G
tcccaacctcttttgaagacaagattcancctggtttaanatccaagtctagaatgttgcntcntcactattttcatnttnaaaatgagtngcgccctcgnaggtaattcggnatcccggccgcggccatattaaaaatgggcccgcctatgnggncaaanatctattttggctttttttacccttggcaaggaaaatacntcattaangccaccttctggtntatttttacccccccaatctttca

SEQ ID NO: 5361 - DNA, 235 bp, Homo sapiens
  misc_feature 37, 50, 76, 89, 90, 92, 101, 104, 107, 109, 110, 117, 119,126, 129, 144, 155, 159, 173, 185, 194, 198, 199: n = A,T,C or G
ttttaccagaacgacccatgctttttcaggattgtanataatatttcagnatatattttatgacatgactttgaanacgctgaagactnncnctaacatanttncangnngggcccngnctaagantgnaaggaaacaccccangggaggaggcnagcnaagggattcattgncctgcacgtttnacagggggncagnncctgcccacgcctttattttaaaattctaaccttca

SEQ ID NO: 5362 - DNA, 249 bp, Homo sapiens
  misc_feature 22, 25, 47, 54, 55, 66, 67, 68, 76, 80, 82, 83, 122, 142,144, 153, 164, 173, 177, 192, 207, 222, 224, 225: n = A,T,C or G
cctttttgaggttctcttcagnccnggataagttccaagctgcaatnaggccannccttttgctgnnnaccctggnagancnnctcataagccacctggtgttatttacccccgatacttcncaagcaaaactgttactganantttgctttnccgcactgganccggggccntacngacaaaatgtatgangaatttagcatgggngttgaaggccctttntnnaaacacaaacacgagacaaacaag

SEQ ID NO: 5363 - DNA, 325 bp, Homo sapiens
  misc_feature 28, 30, 36, 43, 44, 45, 46, 50, 51, 56, 58, 83, 96, 97, 105,107, 112, 126, 127, 154, 168, 199, 215, 241, 249: n = A,T,C or G
agtctttacactggcccatataaaaagngnggaaanaacgggnnnntttnntcctntnttttttttttttcccccccaagggnctttgggaaaggnngcccaagngngaatnggccaaaatttctnngggggttttcaacccggccaaaatttnttccccgccctttntttcggggggttttcaaccgccccatttttnttcccttggccctttnaaaccctttcccaaaaaagccaagcnttgggggnaacttaaccaagggtttccttggcccaacccaacggcccccgggcttaaaatttcttttgggaaatttttttaaag

SEQ ID NO: 5364 - DNA, 364 bp, Homo sapiens
  misc_feature 27, 31, 38, 45, 54, 66, 79, 82, 96, 100, 111, 115, 131, 133,140, 141, 148, 168, 183, 187, 193, 199, 205, 210, 222, 237,279, 283, 291, 296, 325, 336, 342: n = A,T,C or G
cgggctttttttggggggggcaacacntttntggggangcaaacncaaaaaagnggggggcccaangtggggccctacnccntcccctttttttcncctnggaaaaaaaanggcntgggggggaaacctcncnggggagnncccgttntggcccctttaattccaagncccagggggaaaacngggntttccnttttcntttttnggggnaagaagtttccntttttcccaagcaantttttccttcccaaaaatccccccccccccgcttttttaagngggnccctcttnggtcnttattaaaaacccatttttaaggtttttnaaggccccccnaaaaanattttttttttttcccccctcc

SEQ ID NO: 5365 - DNA, 375 bp, Homo sapiens
  misc_feature 24, 32, 40, 42, 49, 71, 85, 109, 111, 132, 233, 334: n = A,T,C or G
agctacctggcatttaaggttcangaactggntttttttntngggggcnaaaacattcttttggaagccanaccaaaaaatgggnggggccaaaggtttgaaaataacncncggcggggggttcttttttancattctttaaccccaaggtaaaccaacccccaaaggcttttttcaagggaatttgggcaaattaaaatttcttcaccaaaccaatttcaattttttattgnaacaatggaattttttggaaaatattggtttggaaaaaactttaacttcttaaaccaattaaaattttttcaaggggaatggttaccccttggtttttttnaaaaaaaatttaaaaaaaggggaaaaaagggtccttcccca

SEQ ID NO: 5366 - DNA, 428 bp, Homo sapiens
  misc_feature 35, 43, 47, 74, 87, 97, 108, 111, 117, 146, 163, 200, 228,241, 264, 292, 316, 326, 330, 334, 363, 378, 380, 394: n = A,T,C or G
cccccccccctttccccccttttttttttttttancaaccggngggnttttctttttttgggccccctttttcnccaccccctttcncacccctatngggggggagtnggncccccncccccaaaaggaaaaaggggccctttttncaccccaaaaaatgggngggggggccccctttttggaaccctttttggggaacnttttcccccaaaagcccccttccccaanaaaaactttaaanggggaggaaaaaaccttaaaccnttccccaaaaggttttctttttaatttnggggagggttatttttttaaccanggggggtaancctngggnaagggggggggccttccaccaaaggttanttttaaaagggggangnaaaagaaacctttncccgggggccaagggcccctttctttgggaaaaa

SEQ ID NO: 5367 - DNA, 206 bp, Homo sapiens
  misc_feature 32, 48, 56, 66, 69, 81, 109, 116, 123, 129, 132, 134, 137,141, 145, 164: n = A,T,C or G
aagacactctctataaacctatataaaagggngcccctttccttttanatttcccnttttttttanggngccccccattcncctaaaaaaaattccaatagttttttcncaacccnggaattntgcccnaantntgntttnaatncgaccccggaccccaatgngttaaaaggggtcacagaaactgaaaaaaattggggtcgggg

SEQ ID NO: 5368 - DNA, 465 bp, Homo sapiens
  misc_feature 27, 28, 40, 48, 55, 68, 71, 72, 87, 97, 125, 126, 128, 136,137, 138, 142, 145, 147, 275, 280, 364, 376, 393, 396, 409,412, 420, 421, 426, 437, 438: n = A,T,C or G
acccatctgtagatctgacccttaacnnaagccccactgntagcctgnaacaatncatggccatggtnccnnaaacctttcctttgnatgactggcngaactgtgcaccaatgggtctctgcttnncnggaggatnnncacnccntngactgtggggctgactctagataatttccacacgccactgagcatttttactgggaagcgtttctttccttctcctggatgatggtgttatcggacttgtatagattaggagggagaccttaggtttnagaancagactgaccttaattcaagtccaagctacccactagtattgggcaaattattgtgctcagaaggtctaacacacaactctcanaaatgttccganaaatagatacccgccanaangctcacacgaaangcngcgcatannaggcntttaataaatnntttctcttctattaaaaaagaaatggg

SEQ ID NO: 5369 - DNA, 676 bp, Homo sapiens
  misc_feature 25, 30, 32, 48, 49, 51, 55, 61, 71, 102, 108, 110, 117, 140,143, 158, 190, 201, 249, 285, 376, 392, 448, 449, 450, 464,513, 630, 659: n = A,T,C or G
ctggggggaaaccttacccttgccntttanangtcaagaaacttgganngngtcnccttgnattggggccncggggttgaaccatttatcttcaacaagccngcttgngntgtgtancaacgccggggggtcttggcaancgnaaccaccccaaaaanaaagcccgggaccttcttgacccattgggtgntccccttgggngccttggtggggccttttttgttgggggcccccttggttggggttaanggaagggccttggggttaccaaaagggtttttttgnggaattccggggttttccattcccccttggggccaaccccaaccccaaaaaagttgggggatttggccaacccttggaaaaaaggaaaagnaaatgggtttttggtnttggggggaatttcaaaagggggggggggggccctttttttggccccccccggtannnttttttttcttaanagggccttggcctttttttcctttcccccccaacctttggggttaaagngggggggccccaaccttttaaaaatttggggggaaaccttgggttccaaaagcccccccaaaagggaaacaaaaaactttgggggggcccccaaaaaaaacctttaaccaaggccgnggggggaatttttaatttccccttggaanttggcccccccttttta

SEQ ID NO: 5370 - DNA, 275 bp, Homo sapiens
  misc_feature 17, 19, 28, 41, 75, 114, 115, 116, 258, 259: n = A,T,C or G
ctttggagcccctgcantnctcctgaantgagggctggtancaatgaacctacagtgaggcagagaagaagaaanggaaaataacctgtgggttcttttacatcttaacccagnnncaacccaagctttttcaggattgtcaataattctcacaacattcattttatgacatgattttgaatatgttgaaacttactctaacataatttcaggatgtacctgtttaaaaataaaaggaaagtctccagggaaaaattnntttttaaaaaaaaaaa

SEQ ID NO: 5371 - DNA, 415 bp, Homo sapiens
gaaacaggttgagacatcacacaataaatcataaggggtagagagccctgccacagaaggaggcctgggttctaaacatcatggagaaggactttacccagcctcagtgaggggtggtggaaaagacgaaaatcaggaaacatttcccaaaagaaaaatgagattctctgatggaaactggaattgagcagagcaaagggatgtgttgccagcagagttgattaggctacaggtcattggaagaacatatttagaagaaaccaaagctagagtgaactccaagtaaacacccaaggttactttttttgtccactgcaagtgcacagcattgcaggagctagcctccgagtgccaagctgctgccattcctgtctcctggggggccgattctgcctttccagaagcaacacagtgg

SEQ ID NO: 5372 - DNA, 192 bp, Homo sapiens
  misc_feature 21, 42, 48, 52, 56, 61, 62, 69, 70, 91, 109, 112, 123, 125: n = A,T,C or G
gatgcagacatccccctactntgggacttgaaaggttcgggncagggngccnagangccanntattttnncccagcttgaaggtcaagttntacagggtttctggccanaanaaccaactccncnttcaaccaggaagcccaagagagctgcatggagagaagggcctgtggaagagccctgaggtgccact

SEQ ID NO: 5373 - DNA, 358 bp, Homo sapiens
  misc_feature 23, 59, 64, 69, 76, 96, 105, 111, 114, 133, 161, 184, 227,237, 247, 264, 274, 278, 283, 286, 290, 299, 309, 320, 321,326, 328, 333, 336: n = A,T,C or G
ctgcagtttgctggaagttaacntgaggaacactattgtgatctaggggaactctaatncaagngtgcnataacanttataaatagcgatgcctgntccttcatnctcagnctncatatccatgaggaggganacagcaacgtacccactggaagaacacnctacactaggtgaacgctgcccngcacataaacctggttcagatactcggcaataggaagtagggncccaccatcncacagaatantttgtgagaggctttgnatatgtggcngcancaatngcngatnctgcttcanctcgacgccntatgccaatgnncactntngctcnatncagcacctcttgatgtttacac

SEQ ID NO: 5374 - DNA, 391 bp, Homo sapiens
  misc_feature 21, 24, 25, 276, 284: n = A,T,C or G
aggcacttccagaaacatatnacnnttgacagttttaggctgactgataaaagtgggcccagcgtctcggaactatttgaaatgctgcaacagcaactacgcaggagtttccttaaaggagatctagcgttatatgaagagacagcttcatagctgatcttactgataaggatctccaccttataggagaacactctgcaaaagtgagaagagaaggcacctattatcaaaatccatccagccataggtgctgtgctcacattgcacctgtcgtgngacatggnggcttgcccatgcacacgaacctgtggcactgaaagaccggggcaggcagtgggcttcagtattcttggaatcctgtgtaatagacagcacttcctgggggctgcgg

SEQ ID NO: 5375 - DNA, 112 bp, Homo sapiens
  misc_feature 19, 34, 38, 42, 44, 45, 50, 60, 70, 92: n = A,T,C or G
tgcgttaataagatatcanactcattctttcttngttnaagnannggganaaagagaaangttttggggngtggccctgcttgaaatctcancagactttacactaaaaaag

SEQ ID NO: 5376 - DNA, 370 bp, Homo sapiens
  misc_feature 44, 48, 51, 54, 82, 88, 96, 98, 105, 140, 148, 315, 338, 346: n = A,T,C or G
aatatgttcaaactcgggacagtcatccaaaggtgggtaatccncatnatnggnggagcccctatccttacctttgcccacntcctcngggatgtncngcttgcnctttgccattaaaggggcccattaaattgggttanaaagggtnggtggggattggaaaagccaaacccattccatttggaccaatttctaaaccttaaaaggccggaaaaaccaaattggcacaaggccggttcaaaccaaggatccaaaaaaggccaagccattattctcccaaggggaaaaaccaaggggaaaaaggcccccctgggnattggaaaaaccacctggaaagnaaaaagcncctttaccagggttcaccctttgg

SEQ ID NO: 5377 - DNA, 190 bp, Homo sapiens
  misc_feature 19, 22, 54, 64, 72, 78, 91, 93, 99, 102, 123, 131, 141, 142,153, 165, 171: n = A,T,C or G
ctgaggctcagagaggctntanaacgtacctgcagcttagcatagtcctgaatnggcacctcanatccccantgaatncatagggtcaatncnatcggngcntggtaaccacatgaagtaatngtttaatntcaccatacnntttgacatgcnaccttttggagncatagntgccgttgcgatataggcc

SEQ ID NO: 5378 - DNA, 156 bp, Homo sapiens
  misc_feature 22, 38, 49, 54, 65, 77, 103, 105, 111, 127: n = A,T,C or G
aggttcactccagaacctattngtctgggtatcaccantgggaggctgngagancagcaaagatngctctgcctgcnccttccttcgggaggcttcatcccananagggcnccctgccagatgccanctggagctctcctacctgggaacctgcca

SEQ ID NO: 5379 - DNA, 281 bp, Homo sapiens
  misc_feature 144, 237, 247: n = A,T,C or G
gaactgaggaaaacttctttgcataaccatgaaggactgctctctatgatccactcaccccatccacaggacacgaagcagcggggaggagcatactcaggtcacctggaaccgatggtgtatctccagggtcttacaacagcnactggctcatcacgggtattcaggatggctgacaaagtctggaagacactgaattccagcctcaggagtatttttcatctgtatgctccctgntgtggctaanaaaaaaacgtgtgttttcatggtaaaaaaaaaaa

SEQ ID NO: 5380 - DNA, 219 bp, Homo sapiens
  misc_feature 79: n = A,T,C or G
gacatatttccagggagtaaaacccaagagatcagcacattttggaaaaaggtttttcaggctgcttttctaaaggttnataccaatttaccctcccgccagcaatgtgcaaatgttgtctagttcaccacactatcaccagcatcaaatgttaggatattttattttttccatctttgagtattttgtaaactaaagaactttattttcaaaaaaaaa

SEQ ID NO: 5381 - DNA, 414 bp, Homo sapiens
  misc_feature 18, 32, 37, 46, 54, 60, 62, 69, 79, 97, 113, 123, 129, 134,139, 152, 157, 168, 209, 210, 211, 222, 231, 256, 258, 260,267, 292, 294, 299, 313, 325, 328, 331, 336, 342, 382, 396: n = A,T,C or G
gaactcccttgtcgtttnaagctaccaaactngtagngctaaattnggagactntgcttngnaaggatnccctttccanaaacctattttggggcgnggggggaccaaccccngggggaaggncttgcncttanaccgncaaaaccattagnctctngtgctcgcttnctttctttcgggaggggctttcatttgcccaggaaaagagnnnccttgccaagnaatgccccntcttgtgaaaccctttcttaaactngngnggaaccngcccttgactaaaaacccttggggntntgctnggtaaaagaaacantgtcccaacatntcnaanaaaanttcgantgttttggattttggcaagaaccatgcccaatcttttttncttggcctttcatngggatggtgcttttacac

SEQ ID NO: 5382 - DNA, 135 bp, Homo sapiens
  misc_feature 30, 33, 38, 44, 56, 59, 62, 79, 89, 90, 104: n = A,T,C or G
gtcaagccctgggaactgacgccacaccgncantagancggccntgacttatgtgnatnatntctggacagggcttgcncatggaggannaaacctcccttttnctcttgtttcacgctgtcctcttggccttcc

SEQ ID NO: 5383 - DNA, 247 bp, Homo sapiens
  misc_feature 24, 27, 40, 48, 51, 57, 75, 81, 86, 98, 103, 111, 114, 124,132, 161, 169, 179, 200, 213, 214, 215, 223: n = A,T,C or G
tgttaacccttttgagcaaagatnagnctggtgtaagtancaagcttnaantgggcnccggtgggcaaattaaanggggcnccctngaggaaatcagnattcngcgcgccnttnaaaaggccgntatggccnagatattttgctttttaccctggaagaantacttatnagcccctttnttatttacccccaatctttanaagaaaactgtgnnnccttcaantgtggggacatgaaaggctttata

SEQ ID NO: 5384 - DNA, 235 bp, Homo sapiens
  misc_feature 23, 39, 57, 84, 120, 135, 175, 176, 190: n = A,T,C or G
ttggataaccatgaaggactgcnctctatgatccacttnaccccatccccaaggacngaatcaagcgggaggaggcatactcanggtcaacctggaacccgatggtggtatctccagggncttacaaccagcaancctggctcatcacgggtattcaaggatggctggacaaagnntggaaagacactgnaattccagcctcaggagtatttttcatctgtatgctccctgttgg

SEQ ID NO: 5385 - DNA, 365 bp, Homo sapiens
  misc_feature 181, 182, 183, 188, 190, 216, 218, 222, 224, 227, 231, 234: n = A,T,C or G
gatgcagcagaagcgacgctgtgtgacttccgaggctgaggctgcagagatttgaggcatctgctctcacccagcttgaagtgcttcctcttggaagccagccaccgtgaaaaaccccgccatgcttgtgaggaagcccaagagagctgcatgggagagaagggcctgtgaaagaaccctnnnggtgncnctcacatgaagtgaaccctttggggncnttcnanccnactnccnacaaaaacgcaagcagcgagtgtccccagtcaacgctttctctctataggagacctgtaaatggggtggcggggggagcaggaggaattttctgatctcacacactgttatgagttgaattgtctccccac

SEQ ID NO: 5386 - DNA, 135 bp, Homo sapiens
  misc_feature 28, 48, 49, 51, 52, 58, 63, 68, 83, 91, 92, 95: n = A,T,C or G
cagatctcaggagatatttttgatctgnatgctcgctggcctggcctnntnnaaaaancgtgngattncatgggagagccatnacacccanncgncacagccgcttttaagcatatggttgatccatatgggggc

SEQ ID NO: 5387 - DNA, 188 bp, Homo sapiens
  misc_feature 88, 118, 121, 124, 135, 139, 151, 153, 169, 172: n = A,T,C or G
ccttttttggagcaaagtttcaagccttggttaaagtcccaaagcttgaaattggccctcgcttggcccattttaaaaatgggcgcgnccccttccgaagggaaaattttcgggaatnccnggncggccgcccantttnaaaatggggccngnttatttgggcccaaantcntttttttggcgttttt

SEQ ID NO: 5388 - DNA, 150 bp, Homo sapiens
  misc_feature 32, 45, 61, 67, 81, 85, 96, 97, 99, 101, 102, 110, 113, 130: n = A,T,C or G
taattcttctatcttttttctttttcttttantcatagggggggntgctgggttatagtgntatctnaacatactattttntccncgtctatagtnntntnnttctaaanccnctctcacattccactcnttcacacctttcctgtatat

SEQ ID NO: 5389 - DNA, 102 bp, Homo sapiens
  misc_feature 27, 33, 38, 39, 48, 49, 54, 58, 76: n = A,T,C or G
ctttctttttttctttactccttaggngggctnatctnnacctatagnntctantatncacttaaaatcccggttnattgataactactattaaataccccg

SEQ ID NO: 5390 - DNA, 187 bp, Homo sapiens
  misc_feature 44, 50, 69, 72, 79, 81, 85, 94, 97, 170: n = A,T,C or G
tgcccaggaaacaaggcgcttcaccaagaggttggaccatgcanggaagnattctctgctagaacactntanagacagnanggcnttgctgacntantggattttggacttctggcctttaggaactgcagagagaatacattgactgctgtgttgagccacccaacaantttgtgacaggaaccct

SEQ ID NO: 5391 - DNA, 335 bp, Homo sapiens
  misc_feature 128, 133, 257, 287: n = A,T,C or G
aggaggacatgaaggctcaggttgcccaagaaagtccagggtcacatggttgattcatctaaggccagtgcctgagtgccctccattgaacaacactgctaggccagaagtcactgaggatgactgangcccnggcaagaaagggacaagtcagagggctgagatctggaagacagagtgtgtcctgcagcctcaaaaacccctgattcactcttcggctctcccctcaaccttctgtacccttatgctttgggtgnatctcttgtaaccccacaattgggatttgntctttatccattctgacaatctttatattttaatagggagcatttaat

SEQ ID NO: 5392 - DNA, 155 bp, Homo sapiens
  misc_feature 21, 36, 39, 40, 52, 64, 81, 83, 89, 91, 96, 110, 112, 121,134: n = A,T,C or G
accttaggcaccaggaactgnatacataccctagancanngacttactgagnttccttgatggnatttttgagctggatgntncatcangntattnatactacttaacgngntatattaanctgggcacggctnggccatgggatgacactccta

SEQ ID NO: 5393 - DNA, 293 bp, Homo sapiens
  misc_feature 70, 76, 145, 158, 160, 163, 210: n = A,T,C or G
acccattcatttggtaaccacagacatcttatgcttttcaaccctaaatggtttacgtatctgatccagngacttnaaatcccattccaccgtctctacccattcaaaccccaggactttgtcaagaccattcccattctttgtnctttgttacatgncncgncttccgatgctcctcaccctcccatccgcctctgctctcggaccttncagagcttggagcagcgtttccctccttcgaacataaagaacaacctgtacttactgtgctgctcctcactgaaaaaaaaaaa

SEQ ID NO: 5394 - DNA, 128 bp, Homo sapiens
ggaacttgaaaatgacacagagagaaatgcaagtggcaataggatccagaaaccgagagactcatggaaaggaggcagccggtggaagcaggagacagcagaagccaagccaaacagcaaaaaaaaaa

SEQ ID NO: 5395 - DNA, 351 bp, Homo sapiens
  misc_feature 78, 99, 146, 172, 194, 198, 199, 204, 208, 216, 230, 233,242, 245, 249, 252, 261, 264, 277, 284, 302, 303, 320, 332: n = A,T,C or G
cagtttgaatatgtcatcccactgcctttggccttcatagcttctggcccacgaaagggaagaattacatgaagaccnccacgggaaaaggggagcccngggggaagagggtttcagaagccaaccaaaagcctggctggatattnttggatcttgggggtctaaccctccnagaaccggtggatgaaaaggtnggtnnttaancccntccggctnggggattggggganacnagtctaagncanactnatngcaagcctngcncaaaccttttgcnatttaantcttttttctcaagcatnnattttttctcccgaatnagcccttattantcaggggaggaaaattaaa

SEQ ID NO: 5396 - DNA, 330 bp, Homo sapiens
  misc_feature 39, 48, 49, 55, 56, 72, 80, 110, 118, 165, 194, 197, 205,213, 221, 231, 232, 242, 255, 272, 282, 290, 296, 297, 298,301: n = A,T,C or G
acccatggagaggggagccaaggggagaggttcaagaancaacaaagnntgctgnnatcttgatcttggggnctaacctncaaaaacggtggacgaattagtgcttgtgnatttaacnccattcaggtactcgtggtgtgataagaggtgacaaagcaagtctanatgcaaggactagatggcgaacgctcctnggncaacaagnactttatngccaatgntaaatttctnntttgtctcangtcatggcatatnttcttcctgcccgtaanttacaggctncgtaaatnatcagnnnggntggaaaccatccatacatggtggttaaaa

SEQ ID NO: 5397 - DNA, 106 bp, Homo sapiens
  misc_feature 61, 86: n = A,T,C or G
atgcaacttacctgaggctcaacaacagacagaatttgcacccagcatctctaagactccnaggtcaccagttcccagagaagaancacactataaggggtatata

SEQ ID NO: 5398 - DNA, 116 bp, Homo sapiens
  misc_feature 67, 74, 90: n = A,T,C or G
aaccactgaggaggagcactcacatgaaagtgactggaggggaacgattcacagtctacaatagccngccaaanatcatgcgccaccctnaatacaacaaagggactcctctggta

SEQ ID NO: 5399 - DNA, 196 bp, Homo sapiens
  misc_feature 54, 145, 153: n = A,T,C or G
caagagctagtccaaggatagagagttctagcttagagttaggtagagatctcngccaagagccttagaggactagtagagagagctagcacctccgaggattaattttccaccaccgccactaggagccatttttttacctagnggggaaangacagtttctttttccttttcttcctaggggataggatagggt

SEQ ID NO: 5400 - DNA, 197 bp, Homo sapiens
  misc_feature 19, 29, 32, 37, 52, 54, 59, 64, 68, 69, 75, 82, 102, 140,143, 151, 155, 161, 168: n = A,T,C or G
atactctccttccccattnttagatgacnatnctacntgctctactcgggtngntaatnttacntttnnagtccnatggggnatctacctagcatttaagtnagcaactgcaggtatgcagcagaaagccgacgctgtgnganttccgagnatgnggctgnagagtanttgaggcatgatgctctcacccatctatg

SEQ ID NO: 5401 - DNA, 172 bp, Homo sapiens
  misc_feature 26, 33, 71, 109, 112, 114, 122, 126, 142, 147: n = A,T,C or G
gcgagaacttttaatcagtaaaaggngttcaanaactcagggaaggacatgggaagacatcctggggtctncccgtttaacattggacctgtttccttgcaaccttaanggngncataagcncttngaccaccttaacccantgggnatttagtgcaccccggattaaattt

SEQ ID NO: 5402 - DNA, 163 bp, Homo sapiens
  misc_feature 17, 19, 53, 85, 98, 101, 104, 117, 119, 128, 137: n = A,T,C or G
tagtcctgaacctctcngntttttgcccactgctggcctcaaacaatccatgngccatagagcacctcaaacctcttcctttgcntcacatgcaccancanccnggtgaaaatatantngtatatttntatgggagnaaggacaggatttccgccaagagccc

SEQ ID NO: 5403 - DNA, 221 bp, Homo sapiens
  misc_feature 31, 41, 45, 53, 77, 101, 120, 136, 139, 149, 150, 152, 158,162, 164, 165, 167, 168, 172, 196: n = A,T,C or G
ggctcacgcaatcgacagaatttgcacccanatggtctaanactncaaggtcngtgttcccagagaagaagcacagnattactagtatacggcccacagtnctggaggtagatctctcanggattgagaaaggacnatngggaaaatcnncnttcaanactnanntnntcantgcccacattccaaatcaggcccnccaatgagcttggacaagaccttga

SEQ ID NO: 5404 - DNA, 136 bp, Homo sapiens
  misc_feature 19, 66, 84, 87, 103, 107, 117: n = A,T,C or G
aaaacccataccttcgcanaggtgttcttttattttggggaaggcaatttttacccagggggttancttggggaagtgggggcntcnaaccaagatattttanaagnggaaggaaanggaccttcccgggccaagt

SEQ ID NO: 5405 - DNA, 264 bp, Homo sapiens
  misc_feature 21, 35, 40, 74, 77, 87, 89, 97, 100, 101, 112, 118, 133,136, 137, 142, 146, 149, 151, 155, 158, 168, 173, 179, 193,202: n = A,T,C or G
tcttaagaaaaattttttttncattatacccttgnaaagnacatgtttctctatgaaaccacttcaccccaatncanaaggtaccananatgcacgnttnntaggatccttncttcangtcaccatttgcacntcnntgttntcanttntncctnttncttttcaatnagcangcttgncttccatcaccggngtaattcangagattgggcttgaccaaaaggtcttggggaaagacacctggaaattcccacctctctagtg

SEQ ID NO: 5406 - DNA, 193 bp, Homo sapiens
  misc_feature 31, 35, 36, 47, 52, 60, 66, 69, 70, 72, 75, 76, 78, 81, 93,167: n = A,T,C or G
tgggtataggagacagttaaaaaaaagaccnaaannggcctctgggnccatnccagcttnctctanacnngnttnntnttnttaaaagggggnggacaaccctaaaaatggccgtcggtaaagtcacacagcctggagctccacacctgttcctgggaataaacaanctttgctttgcttttaaaaaaaaaaa

SEQ ID NO: 5407 - DNA, 182 bp, Homo sapiens
  misc_feature 25, 33, 40, 56, 59, 61, 77, 78, 81, 83, 95, 99, 108, 140,152: n = A,T,C or G
gggggggtaagacctaccccttggncattttanaagattncaagccaaaacttggnagngngaagcgccaccaagannggncnccaatacccttntctnatccgaganaaagcaattggccccggcccatccccgagggncctcccccatcnttcttgcaaaaggcccgggtgggacaaaaa

SEQ ID NO: 5408 - DNA, 178 bp, Homo sapiens
  misc_feature 18, 28, 88, 89, 100, 102, 118, 128, 149: n = A,T,C or G
attaccttaatatgcccnacatctcctngccaaagacaagtggacttatgaaccaaattcgttcatttgcacgctggaaatttcgctnntttcactactncnagaacacagaaaccantttcttgatntcaccgccattatcattatanaaaggggataaccattagacctacaataa

SEQ ID NO: 5409 - DNA, 192 bp, Homo sapiens
  misc_feature 26, 39, 52, 58, 79, 86, 91, 96, 99, 157, 163, 172: n = A,T,C or G
gctgccaatatccccgaaggaaagcntaaaaacggaagntctaagcccctangagggngcggaaacgggactggcccanaccttgnaggcnagccntgngagggaccctgaaccagagacccagactaagccttgctcatattcctgacccatgggnacaagngagaagatnaatgggtggtgctttaagcc

SEQ ID NO: 5410 - DNA, 171 bp, Homo sapiens
  misc_feature 27, 28, 29, 32, 38, 61, 62, 65, 83, 85, 101, 102, 105, 124,153: n = A,T,C or G
gcacgcttgcataacggagcaatgatnnngangtccancttgaagtccaccatggatttgnngcngccttgctggctcagaananggaggccttcatgtgnnggnacccatctgggccccttgnttcaggacttccgggctcccaaagactgnagaactccaacctcctga

SEQ ID NO: 5411 - DNA, 606 bp, Homo sapiens
  misc_feature 25, 27, 42, 48, 52, 54, 55, 62, 78, 82, 91, 94, 95, 96, 101,102, 113, 116, 123, 137, 138, 141, 151, 158, 163, 175, 217,224, 230, 240, 265, 346, 421, 498, 530, 568, 584: n = A,T,C or G
tgaggatggtcaaacctctggagcngncaacctgctgccgtngtgttncctntnngacattncacccattctcttgangaanggagacaanatnnnacacnnggagatagggnganatttggngacaaggaatgtgnnccncaccccctantgcccanatctntcatagggggtntcaagggctttacaggcactgggttaggtatggggagcccanaccattngttgancgcatgctgntgggaccttccaaggcagtctgccntttgcaacatgaagcaggaacagtggtgcccaggaggcatgggatgcgacaagatggatcattggaagacatggcctgggnctccatggctggtggactgcaggtcatggcccagaagttccccatgcctccgtgaatacaaatggaagtgatganaggcaactgggttggcatcgacctggatgggaatgaaaaagccacagggggaggcttgtgaaaagaaaacacatggncccccaccattgtttaccaaagaaaaggcacngggattaacttccaatcacattttgggcacttaccttnaagtaaccaaagcagnaatcacccacttcccttacctt

SEQ ID NO: 5412 - DNA, 219 bp, Homo sapiens
ctgaggtccaggctaaacaccaggaataaaaggtgaagaaaaagaagttcctggaaccactgcctgcaagctccaagctttctctgcagtcatgggacccgtgaagaacaactctgaacactgcgcagagttacagggctagaggcagagctttgaacaagccacatctcaaaactttggttttgtatgcccataaaattaagcagcagaaaaaaaaaa

SEQ ID NO: 5413 - DNA, 147 bp, Homo sapiens
  misc_feature 21, 40, 43, 60, 61, 62, 75, 78, 82, 90, 93, 104, 107, 121: n = A,T,C or G
gagcatacttacggtcacctngaacctgacttcgtatctncangacctttacaataactnnntggctttatcacngcnattnatgatggntgncaaaagtctgnaanacactgaattccanaccttcatcattcttaaaaaaaaaaa

SEQ ID NO: 5414 - DNA, 505 bp, Homo sapiens
  misc_feature 304, 340, 342, 382, 389, 421, 437, 442, 452, 475: n = A,T,C or G
gtctgggaattcagccaaaaattcctgaaggatgaattccttttcctcggtgaggttgacatttgagcacacatcgccctcttgtgtctacgacacatttggcaacgtagtttccagcacctgctaatgcacacagcaaattgaagccttgttaacatcccttaagcctgcagacctcggtacaaggcggagggagaacaaacgcaccaattttcccagaatagtcaagaacatccagaagaatccagaatttgtgaagatggtggaccttacctttcgaaaactgctatcaaggcctctgcangaggccctggctgtgataaatgtgcatctgtagaangnacaacctgaacattcttaccaagcaggcctgaccaatatntttctgnctaaaaaagggccatgctgaaagatgcctttnaaacccattttggccnttttnaaaaaaccgnacttgtgggataactggcccatncaaatcaataactggcttatctgatctggg

SEQ ID NO: 5415 - DNA, 105 bp, Homo sapiens
  misc_feature 22, 29, 31, 60, 70, 76, 89: n = A,T,C or G
ccctttttatcaccttccaaantccttantncaaaaataccctttaacctactcccaaanaacttaaatncacccncttgcctcctatnccatcatttcatacaa

SEQ ID NO: 5416 - DNA, 182 bp, Homo sapiens
  misc_feature 68, 69, 73, 80, 102, 112, 115, 118, 133, 136, 137: n = A,T,C or G
gaaaacttctttgcataaccatgaaaggactgctctctatgatccctcaccccattcacaggacaggnngcanctgcgangagcatactcacgccaccttgnaaccgatggncgnttntccagggtcttacanacnngcaacctggctcatcaccgggtattcaggatggcttgacaaaggt

SEQ ID NO: 5417 - DNA, 118 bp, Homo sapiens
  misc_feature 29, 36, 50, 66, 74, 78, 92, 94: n = A,T,C or G
cagagctcacagcattcttgtcttccctncaaaaanctcttttctccaancctgtaaaatggccanattcaaangacntgataagttctccntncttcaaactcacaccaacctatct

SEQ ID NO: 5418 - DNA, 826 bp, Homo sapiens
  misc_feature 39, 71, 118, 143, 262, 303, 305, 377, 406, 408, 417, 423,425, 437, 479, 480, 481, 485, 487, 490, 513, 528, 531, 536,545, 547, 549, 550, 553, 554, 556, 559, 596, 650, 656, 681,714, 715, 722, 725, 728, 751: n = A,T,C or G
gcacgtcttgggggagctaccctggcattaaagtcaagnaacttggagttcttgggcttggaaacgttctnccattggacctcctgtcatcacattaacaagatttgcgcacacagangtactagcagctggtctagggaacntttagcgacgttactagctagagcaccttgggcacacgagaccctttccctattatacaatgcgaatggaaaatttgcaaagacactcgtgccatttttctactatctctatcaaccanggtatgcgtacttggacacactatcccacccgttccatccnantggggggggggggggaacaactaccaagcgaacacagctcgttgcaaagcaggaaaccaggggcctctttgnactcttgtggagacttgtggcacatcccnancttaccttntggganangatgccacaacnactttgttataaatattaagaaagttttgggtggggaccggnnngccnangtncccttgaagccaaaatttcttgnagcaaacttgggaanttncttgnggaaggaangngnnggnngnacncacgaattcttacttgggaccaggggataatatttgnttcggttttcccttaaaaggataaagccttgggtgggaaagaaagggcacccanatgggntacccatttttgttaccgtttctanggaaccattcaaaaaataaatgggatcccctgnntattttnggnaanggggaaacaagatttcattgggngaaacaaacttggatccaccattgggaactggcattcaactttggaataaggggggggccctttcatttaaggaa

SEQ ID NO: 5419 - DNA, 190 bp, Homo sapiens
  misc_feature 32, 38, 50, 51, 54, 58, 66, 73, 75, 77, 79, 80, 81, 83, 87,91, 102, 115: n = A,T,C or G
ccaacattcccctagaatacaagattttgaancagccntgcctgcaacannaangggngggaaatntatcttncntncnnntntttnggcnccagtgcttgncacataaagatgncccacaaaacttcaatgacagaagagggaaaggaaagaaagtctgacagatatctaactatatccaagaaagaca

SEQ ID NO: 5420 - DNA, 423 bp, Homo sapiens
cacaattaacagtgcatacctcctgggaacatgttaccaaaagttagaaggccaaattccctcagcctctatccagcatcacaaataacttcaatgagaaccataggaacatcgagtgtcctgtgaatctgagaactgcaatgggccctaggggctcttccatccaggcttatcatgattcaggagaagaaattgaggaccgaagacatcaaatataataagctaatggaggaactgaggctacttgcctggctccagtgctctttcctttgcctcaaaatctttacaggtcagccatctatcatgtgtagaataagcaaactgaattaacattggaaatattaaaaggaacagaggttgcgtggatattggttggaacagagaagaagttttcacaaggaattaaagtaacaccagctgctc

SEQ ID NO: 5421 - DNA, 129 bp, Homo sapiens
  misc_feature 47: n = A,T,C or G
gatcatgcttacataatgaaactccaataaatctctggacatggcancttgggtgagtttccttggctggtaatactctgtgtattgtcacacactgatgttctaaagagtcctgacttcacaggggag

SEQ ID NO: 5422 - DNA, 334 bp, Homo sapiens
  misc_feature 257, 260, 294, 295: n = A,T,C or G
aaagctcctagccccgcaggggtgaaccggctgctgctcccgcgctgggagtgctgtccatccctcggtgctccagcagccgcccctgggaggacagccccgtttgaagcccacgtgcaggcgaaaccccttcagagctgggcatgggtttccagtcatcgccacatcactctctgtctgaacttgaacatacctcaagcttgctggttgttactgggtcgcagtaactagattttcttggggggttggtggtgggnggntggaaagatacatccagagaatgaaatgcaatgnngcctcttattcaccaagaaggttttcaagccagaaaaaa

SEQ ID NO: 5423 - DNA, 352 bp, Homo sapiens
  misc_feature 20, 32: n = A,T,C or G
cctacatccatggatctgancaggaccatctntggacaagacagccagctggccaccagcacgcacggatatatttttctgccagtctggaggatgcagttgtctcctctgtgccagttatcatcttctgcattaatcactagagaagagctttggagactggattctcagatgttggtaccagaagatagctgtacggggtttcatccctcgacgtgctccaagcttggcttgccccaagggctcatcaaaaagcaggaagatcctggacttctatttttaagtgatagctgttatttaccccaagtctaataagtgtatatggaaacttctgcctcctcattgataaaaa

SEQ ID NO: 5424 - DNA, 348 bp, Homo sapiens
  misc_feature 24, 32, 33, 50, 51, 59, 63, 87, 93, 95, 97, 113, 115, 127,128, 133, 142, 148, 164, 200, 204, 300, 301, 302, 303: n = A,T,C or G
aaagtagaatgtataaaggctgantgagggtnnctaagaggccacatttnnggtagcanctgngatttactgggaggagcactgganctggantnanaagatctggaccctantnttactagctcanngattntcaataatncccaanttaacttccctgaatntcagattcctcagctgaaaaacaggctcaagattgntttncatcctcttaccgcactcccagcccacagcttgctgtgaaagcttcatgagaacatgtgtgcggaagcacatgagcactgactgtgctagggcctnnnncggggcaaaagaggtagctttcctgacacttatgccagtttggtt

SEQ ID NO: 5425 - DNA, 270 bp, Homo sapiens
  misc_feature 23, 38, 40, 103, 161, 182, 184, 189, 219, 226, 230, 238: n = A,T,C or G
ggacggccctggactatgcgcanggcagcaagtggganancctgcactgtccaacaggttcacatgcgaggatacaggatatacgcgggtattgtacacaatntgatggacacatagagcattacctgcactggctactagggaagactctccctcggganttgtactcgcgaaaaagatgnancatancgacccatcctttgtgtctcttgcgcactngtagctngatngaacacgngaatcttgcggtaaccaagggcgtttggaagg

SEQ ID NO: 5426 - DNA, 295 bp, Homo sapiens
  misc_feature 55, 65, 66, 68, 73, 79, 88, 90, 94, 98, 108, 115, 135, 143,145, 146, 154, 183, 193, 205, 216, 228, 246, 247, 268: n = A,T,C or G
ctggggtgaaaggcttaagtcatactgaaggcgctgtggtcccaggaaaaaaccngcattttctnncntacanagctantactggatncntggngagnaaaaggtgantgcttanggagggcctggcttcacttnctcctttngnngggggaangaaaaccattcctacttccagaggttcgngatggagttnaatgaggataanggggtgccccngattgaccacantattatttcaaaactggnnaacttcccttcttaccacttngccaataaacttcaaatgctgaagggc

SEQ ID NO: 5427 - DNA, 458 bp, Homo sapiens
  misc_feature 24, 26, 49, 68, 75, 84, 85, 89, 104, 109, 113, 133, 185,187, 211, 219, 258, 277, 315: n = A,T,C or G
ggcatggagccaccccatggactncncttggggggtgggagagcctacncaggggggaggaaaggccngcttccncaatcatanncaantggcagaaaaaaaanggggnggcnttgggaaataaggcttgctnttgcttgaaaggggaaatggaattcattttggaaggggggaagaaaaccaangntgccagactggaaaagaacaagcnaaattgcntggaaagccaaattataccaccaaggttaaagcttgggnaaaggggaatgccaaatcnttaaacgccaagtggggaaagaaaaaggggttggggcnttccgctttggaaaagaaagtttccattccttgtggattaaaggaaaggggaagaaggaagaaaccgaaaagccattgttgctttaagccaaattaaaaagggtttaccattattatttttggggggaattttggtaaaaaaa

SEQ ID NO: 5428 - DNA, 138 bp, Homo sapiens
  misc_feature 23, 39, 40, 43, 65, 84, 88, 101, 102, 105, 121: n = A,T,C or G
gacacttacgccctctcacagangaaggtaagggttcanncancagcacatagaggattatcctnattgacccaggactgacantgtnagtgaattctaannctncgctatgtggtgaatntacttgataaaattgaa

SEQ ID NO: 5429 - DNA, 129 bp, Homo sapiens
  misc_feature 34, 35, 45, 57, 83, 85, 101, 105, 109: n = A,T,C or G
ttgacctgatgaatcacatgaaggatgatgcccnnatgcttcaanagctcccggatntaagtcaccaccttaactgcctattnancaggcactcgaatganctcncaangccatttgttgactgggatg

SEQ ID NO: 5430 - DNA, 235 bp, Homo sapiens
  misc_feature 130, 153, 163, 173, 186, 196, 203, 211: n = A,T,C or G
aggcctctgaagaggcccacatggtgaggaactaaagcctactagcaacccacatgtgtgagcttcgtaagcaagatcttgaaggcctgcccaaaagccacattgaataaaaccgtgggaagcaaaattnccttttaccccaccccaaccccncattgaaaanccttcaggangggattcccacangcttcctttnaaaatanctttaaanccccagttcttcaaaaaaagaaaa

SEQ ID NO: 5431 - DNA, 252 bp, Homo sapiens
  misc_feature 33, 34, 43, 51, 52, 70, 83, 87, 99, 107, 126, 141, 150, 159,173, 174, 176, 178, 180, 193, 200, 207, 222: n = A,T,C or G
cgggagcaaatttcctttttttaaggttcctcnncaaatgaangtggaaanngaaaaccttttgcctttnatttttggattangcantaagcaaccccntgaaaccngaaggtggtaagaacttcnggcgttggaattaanggcggttgnctgaatggnccagtgcggggggnngnangncttctttgggccnacccccnaaaaaangttggttattatttnataaacttttggggaaccaaaaaaggaaaa

SEQ ID NO: 5432 - DNA, 280 bp, Homo sapiens
atgggctctcattgtgtaatccaggttgacctggactttacgtcaatcttcctgcctcagcctccccagtgcagactacaggaaagatccacccaccatgtccggctcatgcgaagggataattaccacctaacatgtgaaatgtcttcttctcccagtctatactgttaaaatcttgcccgtcctgttgaaattcaaatatatgatgcgcatgtatgaaaagatcatgatgagacccagtattatgtataattaattcatggcaataaaacgttgtttt

SEQ ID NO: 5433 - DNA, 106 bp, Homo sapiens
  misc_feature 30, 34, 51, 71, 88: n = A,T,C or G
ccttgacagcaggaaaaagagcgggctgcnacancagaactggaatggttntttcatgcacttttcagtgngagacacagtcattggngctctgtattgcatgctg

SEQ ID NO: 5434 - DNA, 281 bp, Homo sapiens
  misc_feature 18, 28, 30, 39, 50, 55, 64, 90, 96, 101, 110, 123, 144, 148,149, 154, 159, 160, 162, 167, 170, 197, 199, 206, 234, 235,243: n = A,T,C or G
tcccacctactgtggccntgtctgtgtngnagaactccntacacccaggntttgngtgatccanccgaaaagtgggccatgcatggtacnctggantgttnctgaactanccacaaagaatgnaactcttgccaacaacaaaanttgnncttgnaaaannantatcnccnaaaggatacaaaatgactttgcccccngngcatgcnaagccatgcatgctggggccgaacttcnngatactgnagaagtcctgcctaactaaatgagtgctgttttattag

SEQ ID NO: 5435 - DNA, 326 bp, Homo sapiens
  misc_feature 28, 39, 60, 66, 114, 124, 136, 167, 169, 170, 180, 190, 195,232, 250: n = A,T,C or G
tggggctgggggagctaccttgcatttnatggcaaaacntccagggttcccttgatgggngccctngggttgaacattattcttcaacaaacaaacttggttgggaaaaaagcnggggttcttncccaaggaaacnaccaaagaagagggcccgggacttttggaancnntggggagggnccttgggggnctggnaggacttttgttgggggcccttgggggggtaaagganggcttgggttaccaaaangggtttttggggattcgggggttcatttccctttggccacccacccaaaaaaagtggggattgccaccttggaaaa

SEQ ID NO: 5436 - DNA, 101 bp, Homo sapiens
  misc_feature 26, 28, 33, 55, 76, 78: n = A,T,C or G
ggaaccaattggattaaaaggaaaancnaaatnttggaaaatcccccccaatacngatttttgaatgccaaccccntncgccttggccttttggaaaaaat

SEQ ID NO: 5437 - DNA, 154 bp, Homo sapiens
  misc_feature 21, 42, 55, 68, 93, 109, 130, 136: n = A,T,C or G
ttgtattattaggaggagacnatgcccaccatgttaggcatngatggtcccaatntcttgacctcttnatgcacccgccttggcttaccaaanggctggaattacaggnttagatatcactgaacccatnctatantgctaataaactaagact

SEQ ID NO: 5438 - DNA, 400 bp, Homo sapiens
gctctccctggcccagctcaacaggaagtcagaagacgtggaagcccattgatgcaacccatatacataagccttcaaaaggaactgaagagaaattttagtcaagaaaagctacagaattcaaatgagctgaagatccctgatgactttcctgttcataatcagatcgtagctaatttagatgttgacttactggtaacttcatgtatgatcaaaccaaattgaagatctccatgaagtagcactttgtgggaaaaaagttttactgatattggcagtaaggttcagatccacccatctaaacctctacctaagtttacaaaatacctctaaaaccagatgctaaagaagaactaaagccaatagtccaaaggcctaatagagaaaagatgagattttt

SEQ ID NO: 5439 - DNA, 193 bp, Homo sapiens
gtggattggctccaggatggaccaccatggataacaaaatctggagatgctcaagtctcttacagccagccctctgggtccacagatacaaccaaccacccatcagctgatgaggaacccatagatttaattacatacagataattattaaagagattatctgcagaataaattattaacatacaaaaaaaaa

SEQ ID NO: 5440 - DNA, 130 bp, Homo sapiens
  misc_feature 35, 102: n = A,T,C or G
catattcacccacatgaatctatgaagttgagaanggttccacgagagtcatgatatcctgcctaagatcttttcacttctttttaccacgtatcatataanagacgacatttttgaggcgacataaaaa

SEQ ID NO: 5441 - DNA, 194 bp, Homo sapiens
  misc_feature 21, 37, 43, 54, 62, 66, 72, 77, 89, 97, 104, 105, 111, 124,127, 134, 140, 171: n = A,T,C or G
accatatatcctgccccccgntgcagggctacatggntgatgnttaaaagaacnagtttgcnatanaaattnaaacnggcgcgccctcnaggaattntgatccnnacgccntttaaatgggcgntanggccgantctttngcgtttttaccctggaagaaaatactaatangccacctttgttttttaccccca

SEQ ID NO: 5442 - DNA, 267 bp, Homo sapiens
  misc_feature 29, 42, 49, 56, 83, 90, 93, 108, 109, 118, 124, 139, 149,150, 151, 176, 179, 180, 181, 186, 188, 194, 207: n = A,T,C or G
gaaaagccttcaaataagaagattgagangagttgggatggntgctcanggctgcngctgggtaaagctgtctctcactcccntttgagnganaccaggctggagtanncacaagctnctgcgnccaattcttttgtgntataccctgnnngaataactgataaaccacctctttnttnnncccangncttacnaagaaaggtgtgncttctctcatcagtcctattcagcatgtactaaaagtcctactttgtgcaaaaaaaaaaa

SEQ ID NO: 5443 - DNA, 118 bp, Homo sapiens
  misc_feature 24, 25, 46, 57, 64, 66, 69, 78, 86, 87: n = A,T,C or G
gtgctactgcttaaacgtatactnntttaacattgtccggcccttncgtataccagnactgccnanttncaaccatangaataganntctgccaacaacaacaatgagcttgcaacat

SEQ ID NO: 5444 - DNA, 134 bp, Homo sapiens
  misc_feature 25, 32, 39, 47, 52, 54, 55, 56, 57, 61, 63, 67, 68: n = A,T,C or G
gagctcctgtgttggaaaacacatnttgactntgtctancggaccanactgngnnnncaananctannacataaagtgctcacgaggccctccagaagcctcgcagactgcggcagaaccaccctgcgcaaaag

SEQ ID NO: 5445 - DNA, 213 bp, Homo sapiens
  misc_feature 18, 48, 75, 85, 92, 140: n = A,T,C or G
tttggggggggggggggnaaagggcccctttaaaccccccctttgggncccaattttttttaaaaaaagggtttncccaaagggnaaaaaancctttggggaaagggggggaaacccttttttttttgggcccccctttncccccccgggggggggcccccccaaaaaaaaacctttggggggcccaaagggtttttttcccaaaaaaaaaaa

SEQ ID NO: 5446 - DNA, 440 bp, Homo sapiens
  misc_feature 32, 42, 120, 147, 178, 190, 232, 244, 246, 265, 270, 279,291, 300, 335, 355, 362, 365, 407, 423: n = A,T,C or G
gtccatggggtgagatcgctgactgactgaantgaaactgtnctctggggtgtgcagtgacccaaagaccaatggagggaggaagaatagatgctccaaatggccactgcacttctccantgtctgaagccacctgcaaatgattgntagtcactgcctgcactgagacaggattctnaggccaagtcanggcttagcaggaaagaatactgtgacctacacgccttctcanccaaacgcacangnacaggaatggccacatatngtgcntcgggtcanccaacgtttctngggggcttntccacgggcaagactcctttcataatccctttggngatgccttgcaaataattcncattctnccnaagcccttcaccctcaccctatgaaaggggttacctgaaatntaaaattctttgggcngtgggacccttggaaat

SEQ ID NO: 5447 - DNA, 252 bp, Homo sapiens
  misc_feature 36, 43, 49, 51, 99: n = A,T,C or G
tcttcttatgaatccacttcaccccatccacaaggncagaaancagcgngnagggagcatacttcaaggtcaccttggaacccgatggtgtatctccanggtcttacaacaagcaactgggcttcatcacgggtattcaggatggcttgacaaagtctggaagacacttgaattccagcctcaggaagtatttttcatctgtatgctcccttgttgtggctaataaaaaaacgtgtgttttcatggaacatc

SEQ ID NO: 5448 - DNA, 285 bp, Homo sapiens
  misc_feature 16, 44, 65, 68, 75, 83, 86, 87, 101, 102, 116, 126, 129,134, 135, 140, 142, 217, 221, 234, 238, 244, 248, 268, 269: n = A,T,C or G
ctactgggaggaggtntcccttattctgaggaggattactcccngaggatggctcagttgccccnttnacttgtngagcctantcnncctacagaatgggnnggccacccaactanggccttaatnggntgagnnccatngnacttggcctaacaccctctaacacttttgcagagtaaatcaaacatccagtgaatttatacatttattgatcaantggnccagaacccaccnccancctttngganggccaacattaaaacggggnngcttatggcctggggg

SEQ ID NO: 5449 - DNA, 283 bp, Homo sapiens
gtcttggaacagatttggacctctcaggaagacccccggtcatccaagctaaaatgcgaaccatctccccaactgctttttatcacagtaccctgttttgtacacttcaccacttcactacttgtaattatctttttttaattgcttactttctcaaatgtaagtttcacaggtgcaaggattctgtttgtcttgctttgttaccactgaattcccaatgcaaagaaaagggcttggcaggcagcatacaataaatattgattgaataactgaaaaaaaaaaa

SEQ ID NO: 5450 - DNA, 145 bp, Homo sapiens
  misc_feature 20, 22, 27, 52, 71, 88, 98, 105, 109, 115, 128: n = A,T,C or G
aaccacaaatgctggttgananacgangcttcatcatgttgccaggctcatntacatctcctgagctcaanagatccactcaccgtgncctcccaaantgctganattncaggcntgagccaccgtanctggcctgaactgtact

SEQ ID NO: 5451 - DNA, 105 bp, Homo sapiens
  misc_feature 30, 62: n = A,T,C or G
tatgcaacttccttgggtgaaatgtcacancaatatggaagatgcttcactgaagttattcncacttcttaatgattaaacttttaaggaactgaaaaaaaaaaa

SEQ ID NO: 5452 - DNA, 224 bp, Homo sapiens
  misc_feature 23, 24, 70, 112, 117, 189: n = A,T,C or G
ttccaagaaaaaaccttggaagnnaatgggccaaaacctttttccctttttggggggtgggaaaaaaatnggttccaaccaaggccaaaaattaaattggggggaaaaaggnaaatnggccttttccaaccttgggaagggggtgttaatttttccaaccaaaccttttccttttaaaaattgggaatnttaaaaaaaccttttttttaaaagggggaaaacct

SEQ ID NO: 5453 - DNA, 133 bp, Homo sapiens
aaagtttatctaagaatggatctggaaagtgattcagagagaaagtctcgtctcttccttaaaactcatcagtacaggccaggcacagtgactcatcaagtctgtaatctcagcactttcggaggccgaagca

SEQ ID NO: 5454 - DNA, 327 bp, Homo sapiens
  misc_feature 17, 33, 37, 45, 55, 60, 71, 74, 82, 89, 107, 109, 110, 139,146, 149, 151, 165, 169, 211, 218, 221, 229, 230, 240, 245,252, 253, 254, 255, 264, 310: n = A,T,C or G
acatgctgactgcaacnaacctattatggtacnggtnatcctgtnccaagcaacntgaantgggtccttanaanacactgantgtgccnttccttgaccttggactncnntctccataactgagagccacaaatgctgngtgtganacnangcttcattatgttncacnggctgatctccatcgttctgtgctcacgagatccactcaccnaggcctnccnaagtgctnntattactggnatganccaccgnnnntgccctganctgtactcttgaaaatgggtacagataataccatttaatgttttgngtttgcactacaatata

SEQ ID NO: 5455 - DNA, 228 bp, Homo sapiens
  misc_feature 16, 26, 43, 44, 152, 159, 200: n = A,T,C or G
ctttggccatttttanaaggttccangaaaaaccctgggcagnnaatgggccaaacccttttccctttttggggggttggaaaaaaattggttccaaccaaggccaaaattaattgggggaaaagggaaattggccttttccaccttggganaagggtnttaattttccaaccaaccttttccttttaaaattgggaatnttaaaaaaccttttttttaaaaggggga

SEQ ID NO: 5456 - DNA, 452 bp, Homo sapiens
agaggccaatgagacttgaaccctgagcctaagttgtcaccagcaggactgatgtgcacacagaaggaatgaagtatggatgtgaaagaacgcaggccttactgctcccttgaccaagagcagacgagagaaggaacggcgctacacaaattcctccgcagacaatgaggagtgccgggtacccacacagaagtcctacagttccagcgagacattgaaagcttttgatcatgattcctcgcggctgctttacggcaacagagtgaaggatttggttcacagagaagcagacgagttcactagacaaggacagaattttaccctaaggcagttaggagtttgtgaaccagcaactcgaagaggactggcattttgtgcggaaatggggctccctcacagaggttactctatcagtgcagggtcagatgctgatctgaaaatgaacagtgatg

SEQ ID NO: 5457 - DNA, 133 bp, Homo sapiens
  misc_feature 79, 108: n = A,T,C or G
ggatgaattcaagctaaaagaaaagcacactgatgattctcctctcaacccatccggcaactgggggaagcagctttgnactacacaagaacagggaaataaatattntttaatttaaggtcaaaaaaaaaaa

SEQ ID NO: 5458 - DNA, 137 bp, Homo sapiens
  misc_feature 43, 47, 56, 62, 72, 78, 79, 98: n = A,T,C or G
ccctttaaaccccccttggggcccaatttttttaaaaaggggntttncccaagganaaaaancctttggggnaagggnnaaattggggccccaaaaanccctttttttccccccttttttggggggggggtttgggg

SEQ ID NO: 5459 - DNA, 400 bp, Homo sapiens
  misc_feature 20, 26, 38, 44, 78, 81: n = A,T,C or G
agccctttgggagctcctgnattaantcactaactgancttganaattatatccaggacaacatgaagaaagaaatgnttnagatacagcagaatgcagtacagaaccagacggctgtgatgatagaaatagggacaaacctgttgaaccaaacagctgagcaaacgcggaagttaactgatgtggaagcccaagtaagtaatgccacataaagcacacggtgtccctgcagctagagactagcactcagtcgcgtcaggagcttcctcaatgaaggcatgagaaactaaagaaagcaccaccacaggagaaaaggaatgaattgataagaaattaaaggatgtatggctgcttatgaattaaaaatcagtaaatctgtttttgtttttaaaaaaaaaaa

SEQ ID NO: 5460 - DNA, 427 bp, Homo sapiens
  misc_feature 20, 29, 41, 65, 92, 95, 119, 125, 183, 190, 198, 212, 221,224, 232, 234, 241, 244, 247, 251, 255, 257, 259, 288, 293,298, 321, 333, 336, 338, 339, 346, 348, 353, 357, 382, 394,396, 400, 403: n = A,T,C or G
tttcactcccgtcttttctnctgcattanctcaaaactgangagttgaggcagtgcataacgcanattctaaatggaattcttggatggaanaanacagtcactaattcctggttccanaatgtncacaaaattaactagattacataaatatctacatgcacattgtttattgtacatgttngataatnatgcattntccatgtaacgtgntattacctnacnttttcaananctttcanccnccnccangccncntntaaaacttttaccactcctttccctcatntaccncatcnactccaaccactacgaatagacnccccctaatctnccntnncaatttncncactncctnatttacactacctctccccttctcnctccctccactntntttntcnctattgtataccctctcccctcaa

SEQ ID NO: 5461 - DNA, 327 bp, Homo sapiens
  misc_feature 35, 60, 78, 81, 84, 95, 101, 102, 104, 111, 115, 116, 126,143, 155, 160, 185, 266: n = A,T,C or G
tatctgtcatgagacatctaaaaaactgttctganctttgacattctgccatttggagantgctatatgactgctgantgncanatcaggctacntgctgnngntacgtgnctgnnccaccacgantggccggccatagcctnttaaatgctggncattnttcaaggcccccttcaggaaaattngggaggacctctctgaatctgaagacactgcattgtaaactccctgaggacaagagatcatcccagtctttcttgcaaagnggatggagtcaaggaatttgaatggaggaaatggtgaaataaaatacaatctcttacctgg

SEQ ID NO: 5462 - DNA, 223 bp, Homo sapiens
gttttaaggccgctctgttgggaccatggtgttaccttcgcgattacactggatcagaaacaggccatggagggacaggatccggaggcgccagctcaaccaatttcttcaggttgaattacctagaagtttgtcactgacttgtgttcctgaactatgacacatgaatatgtgggctaagaaatagttcctcttgataaataaacaattaacaaataaaaaa

SEQ ID NO: 5463 - DNA, 299 bp, Homo sapiens
  misc_feature 32, 255: n = A,T,C or G
tggaagagcctattcatcttccaaggctgttngctttgcacacatcctgaaaagatagtctacgataaagttgttatgaagatgtatagaaactctggagaattgctcctcaatcatcatccctaaacaaaatgctgagaaagaaaatggcaagctgctgtggaaatacataagaaggaaacaaaccatctgagcatccttggaggcttcctcaggaagatactttttaaactgggacctcagaaaaagatgatngaattaagaagtaaaaacacaagagaaaaagattaaaaaaaaaa

SEQ ID NO: 5464 - DNA, 385 bp, Homo sapiens
  misc_feature 339, 342: n = A,T,C or G
gcatcatctctagaatgaaagaaaggaagaaactgctgtggtcagctatgatcagacagactactggattttgtgtaccacattttacaagggctagacggagtcagaaagaaccactgggagcaccagcagatcctgcccacctgtgagatgggcagaaccctggccgtcctgcctgcggagacagctttaggatgatgctggaagctactgcttcacccactgctgtccaagaagccttacccacatgatctcaaccttcaaacagccctgtcatcttcagcagcacagcctccatctttggacccaagcttggaaagcatagctccctctttttanagntgtccatttcaaagcatctccagtctggatcaacagaagggga

SEQ ID NO: 5465 - DNA, 103 bp, Homo sapiens
  misc_feature 29, 32, 68: n = A,T,C or G
tctataatgaaagaaaggtaagaaactgntgnaggtcaggcttatacatcagcacatgactactgggnttttgtgtaccacattttacaaggggctagacgga

SEQ ID NO: 5466 - DNA, 176 bp, Homo sapiens
  misc_feature 22, 31, 53, 57, 66, 74, 77, 130, 134, 137, 145, 149, 152: n = A,T,C or G
gttacaagtggggcaccatatnagctcgctnggcaacctccgcctcgcaggtncaanaagattctncttgcctnaancctcccaagttagcatgcaattacagccatctttccaggtttgagaccctctnctancancatgaagnaganatnatgaagggaagcaaaacctacagg

SEQ ID NO: 5467 - DNA, 274 bp, Homo sapiens
  misc_feature 36, 125, 148, 164, 205, 212, 225, 227, 229, 236, 250, 256: n = A,T,C or G
ggcctaaccccttggccattttaaaaggttccaagnaaaacttggaagaggttccccccttggccttggaatttccttccccaaaaattaattggttggttccttaaaattccttggttttttancttggaaggttttccccattaangccaacttttgggganggccccattccccattggccaaaaaaaaattccttgggtanggaaaangaagccattttcncnangggaaanggaaagggggaaanggaaanccaaaaatgggcccaaaa

SEQ ID NO: 5468 - DNA, 390 bp, Homo sapiens
  misc_feature 294, 296, 309, 310, 312, 359, 360, 366: n = A,T,C or G
ttaagtcagactgagattcacagagcaaccaaataaagatgattgagtgaatggctaaagaaataaatatgttcgaatctgtacccatctcatgtctttcctgataactaagagtatttttaatacagtgctgaagagccagctgaactggctttgtagatcatcctcaggaaactgacggtcaggcctcctgtatgacaccagggggctgaggctttatggattggatcactgcacccaatgagacacacctgctgcctgtcgaaccaaccctcttcctagctgctccataantnctttttttcctgnncnggacccggtctaccaattatagatcaaattcagctacctgctgctgnngaccanctgctctttctctccctggggtcc

SEQ ID NO: 5469 - DNA, 346 bp, Homo sapiens
aggtgacccagtgacagtggccaacgtgggggctgctgcagacaatgtcttcaccacgtctgtggcgaacgcggcatccatctcaggacatgttctgtctggtaggacggcccttcagatcggggacagcctgaacaccgaaaaagcgacactgattgtcgtccacacagatgggagcatcgtggagaccaccgggctgaaaggcccggcagctcccctcaccccaggtcctcagtctcctccaacccctctggctcccggccaagaaaaaggtggaactaaatacaactgggacccttctgtgtacgacagtgagctgccgtacggtgccggaacatcagcggca

SEQ ID NO: 5470 - DNA, 367 bp, Homo sapiens
  misc_feature 27, 29, 36, 56, 58, 64, 67, 70, 71, 75, 78, 82, 83, 96, 114: n = A,T,C or G
gagagtctcctctgacatccaggctgnantactggncgcgatcttggctcactgcnanctccgnctncanngttnaancgannctcctgcttcacnctcctgagtagctgagantgcaggctcagccaacagagaaagaagaggagaagcagctggatgttgtagaccacggttggacatcggagagaagcggcttgacttcagagggacagcttgatggcatagctttggagaggagtctggctggggatgaccggactccaggggattatcttcctgcttcatccccctttcagctccccttcctgttgagagccactttcatcggcaataaaatcccctgcatttaccatctcaaaaaaaaaaa

SEQ ID NO: 5471 - DNA, 362 bp, Homo sapiens
  misc_feature 253, 260, 263, 264, 305, 307, 310, 337: n = A,T,C or G
ggcagctttggaagaagtagaaggtgatgtggcagaattggaactaaaacttgataagcttgtgaaactttgtattgcaatgattgatactggaaaagccttttgtgttgcaaataaacagttcatgaatgggattcgagacctggctcagtattctagtaatgatgctgtcgttgagacaagtttgaccaagttttctgacagtcttcaagaaatgataaattttcacacaatcctgtttgaccaaactcanagatcanttnnggcacagcttcagaactttgttaaagcaagatcttagaaantncanagatgcccagaagccattcgaaaaagnccgtgaaaaaaagcactttgggagg

SEQ ID NO: 5472 - DNA, 119 bp, Homo sapiens
  misc_feature 31, 48, 65, 71, 76, 88, 90, 91: n = A,T,C or G
taaatggaatcatcacgccatttaaatggcngtttttggtgcaataanttttggttttttacccngccagngaaanaacactttaaangnncccttttatattatacccccccatcttt

SEQ ID NO: 5473 - DNA, 358 bp, Homo sapiens
atgtacagatacacgcagagcgattcatcaactataaccagacagtttctcgaatgcgaggtatctacacagctccctcgggtctggagtccacttgtttggttgtggcctatggtttggacatttaccaaactcgagcctacccatccaagcagtttgacgttctgaaggatgactatgactacgtgttaatcagcagcgtcctctttggcctggtttttgccaccatgatcactaagagactggcacaggtgaagctcctgaatcgggcctggcgataaagaacaaagactgtgcctaaaagtggagagccaggggagtgtgggtcaagataagcagctacagctgcagtttggtg

SEQ ID NO: 5474 - DNA, 269 bp, Homo sapiens
  misc_feature 27, 29, 37, 44, 46, 53, 63, 86, 90, 107, 116, 119, 129, 133,136, 153, 171, 182, 191, 201, 203, 205, 211, 220: n = A,T,C or G
atattcgagctacaattaatatgctcntntgtcacanacctacncnaccttanatatacaatngacctattgatggaaatctcttntttnacacagtaaactacacnacaccacantgnagacatattntctnggncatcattctattccttnccattcttccccatttanttgcaacatcnattgggacnttacgatttncntngcgagngggattggnggggccccctaagctctcactctttctattatctacatcataatagacc

SEQ ID NO: 5475 - DNA, 461 bp, Homo sapiens
  misc_feature 18, 23, 42, 45, 50, 57, 58, 67, 71, 75, 77, 110, 118, 131,132, 143, 150, 159, 174, 191, 202, 220, 237, 247, 248, 253,271, 278, 288, 291, 303, 310, 316, 318, 320, 338, 357, 394,397, 405, 418: n = A,T,C or G
ttattttttcccgcggcncaccntttgtaggaaaaaaagaanggngggtnggataanncccgcaaanaggncgcntnccacaaaaaccccacccgcggggggtgggaggntttataanaaaaatggggggnncaaaccccttntttgaanccaaaacgngtttggggccaaaancgcggggaaggtttaancctggtgtggngggaaacccccaagttangggtatttggccccccnttaaaaggcnnccccnggggggtccccttggcgngcttaanaaaaatttanccnctttcaattccncggttcnagggangncnttccttcaattggaaaangggcctttggaggaaaaanctttaaaaagaaaaagggcccccccccccccgggggnggnaaaaaaanggggaattggaantttggttttaaagaaaaaatttaaaagggattggttttggggc

SEQ ID NO: 5476 - DNA, 228 bp, Homo sapiens
  misc_feature 162, 169, 179, 187: n = A,T,C or G
aactgaggataaggcatcaggaaaggctggggatacactgatgagcaggacacatgagatcagaaaggatccttcaactttctgaagtttacaccctacataaaaaacttcattgttcttcatattgcagatgtgggcaccctactattttgttgggttctntgaactntaaagttgtntattaatngggcattttatatataaaagaatacgttccaaaaaaaaaaa

SEQ ID NO: 5477 - DNA, 113 bp, Homo sapiens
  misc_feature 22, 38, 40, 55, 65, 67, 73: n = A,T,C or G
gaattggccaattcttgttgcntttttacccctgggangnaaaatacttcataancccacctctntntatttntacccccaatcttcacaagtaaaaactgttaatatcgagg

SEQ ID NO: 5478 - DNA, 209 bp, Homo sapiens
  misc_feature 40, 67, 82, 114, 119, 120, 130, 131, 141, 161, 184, 185,186, 187: n = A,T,C or G
aaatcacattcccacatatacttggatctgtttctgggcnctctattctattgattcctttgtctancccgcaccgataccncattgttttaattactatcgctttcaaaaaantcttnntatttgttannggccaagccnctttccttattctttttcanaactggtctacttttttctttgnnnnctttgcccttctctatgaattt

SEQ ID NO: 5479 - DNA, 301 bp, Homo sapiens
  misc_feature 44, 45, 65, 76, 79, 80, 85, 86, 110, 114, 120, 138, 152,155, 160, 168, 171, 228, 239, 243, 275, 277: n = A,T,C or G
cttgagcaattatatccaggacaacatgcaaggaagaaatggtnngatatacagcagaatgcatntacagaaccanacnnctgtnntgatagaaatagggacaaacctgnttgnaccaancagctgaccaaaacgcgntagttaacctgatntgnaagcncaaagtangtnatggccaccatactagctacacgggtgctctctcttgtcagctcagaagaacctaangcacctccagntctncagctcaaacgagctttcccttcaaattgaananggcatgcaatgaaaaccttaatag

SEQ ID NO: 5480 - DNA, 397 bp, Homo sapiens
  misc_feature 67, 88, 178, 181, 197, 213, 235, 236, 240, 243, 265, 271,304, 305, 309, 310, 334, 359, 368: n = A,T,C or G
ctctgtgtacagacttcaaccggaaagaatctaatacctacttgtggaaggtgctgcttgggcaagnggacacaccgttcaaggggangacaccaagcttggaaagtacaatggggccattggatctttgggctcacttgtgaacctcttgcctcctccttgggggttcaaaagccanatnttctccttgcctcaanaccttcttcaaaaatnaagcttggggggaattaacaanngggnggntggccaccaacccaccaccttncaaggnttaaattttttttgggaattttttttaaggganncaannatggggatttttttccacccaatnggaattgcccccaagggcctggggnccttggggnaaaattccttggacccttccaaatttggc

SEQ ID NO: 5481 - DNA, 157 bp, Homo sapiens
  misc_feature 48, 58, 71, 72, 74, 78, 80, 88, 89, 96, 98, 101, 107: n = A,T,C or G
aaaattaactagattacataaatatctacatgccattgtcaggccatntccaaacttncagagcatgactnntnccantncggattanncccgatntncanacgcangagcattccgccagatgggcttctaaaactttaccactgtgtcctcaatg

SEQ ID NO: 5482 - DNA, 539 bp, Homo sapiens
  misc_feature 26, 31, 39, 43, 54, 61, 70, 71, 82, 94, 103, 107, 109, 115,126, 143, 162, 185, 187, 205, 214, 226, 255, 295, 342, 361,376, 378, 393, 395, 404, 411, 421, 427, 433, 452, 473, 488,490, 506, 507: n = A,T,C or G
agaatatcttaacatgggcacattantttgnaaatgggncttnaaatggacganatgcccntcaatctanngagggttgganaccaagattctnaagaatctncacngnctttcnattggcctctntggacctaattcctctnacccacccttgtgaagggnaagtaagaccaggccaccaaggnangggattggaaggaaaaanattttgganaagccttcccanaaaatttaagttttttggttggccaaagnaatcaccaaaaacctttattttaaaaggaaggggccaagnaaaccccccattttttgccaaggaacttggccggttccttttggaangaatcccccaaccgcccanggaaaacccttccgncnaagccttggaaagtngntccccaccnttgggtngggggaattnaaaggnaatccnacccctttaaagaaaaagnccaaaaaacttaagcccaacnttcaaagcctttggnangccccccatttcccanngggggccccacccctttaccttgggaaccccc

SEQ ID NO: 5483 - DNA, 538 bp, Homo sapiens
  misc_feature 65, 76, 119, 184, 197, 209, 253, 296, 383, 481, 514: n = A,T,C or G
gtcaaagatggcatagatctggtgtccaggagacactcggtgcatggtagctgttgtcatcatancccatggaggntttgggtgacctccaaagggcagggcttcgggaacatcactgncttctgctccacggaagttgtctctaactcctgacatgctggaatagccctcaagtgatcagaanaaatgctaaatgntaacttttctgnacatatttttaaaatctgactttcataatagtctccactgttgnagagttagagaaaaatgaaagtctatctatagtaaaactttgngattaaatattatggtgcaatgccccaaaaatgaaatgttctgaatcttgaccgcggatctccatgtatattttaaaacttccatcnacccctttttctacattttcctcttcattttggtgacctttgcagaaactgagctctgggtcacctctgatcagctgggcaatacccttgacattggntacatatgctggccttctggcttcaaaattatngctttggtttccccaataaaagca

SEQ ID NO: 5484 - DNA, 288 bp, Homo sapiens
  misc_feature 20: n = A,T,C or G
ctgggagctcctgcttagtnagaactggagccctgtaccatgaaagatttctggccaccctgctgaagaggccacatggtgaggccacatggagaggaggagaggtccactgatccagcattttagttgagcttccagctgactccagcctcaagctttatctgaatgcacctgcatgagagacttctaagcaagaccagcagaagatccacccgctgatcccagacaacccatggaaccatgagagagccaataaaattgtggtggttttaaagccaaaaaaaaaaa

SEQ ID NO: 5485 - DNA, 228 bp, Homo sapiens
  misc_feature 25, 29, 31, 33, 35, 36, 49, 64, 65, 71, 89, 117, 126, 140,142, 166, 184, 185, 198, 202: n = A,T,C or G
ctataacaacgaaaaacatcgcttnaaangnancnntttctcaatcatnacccacaggatgttnncctatnataaaagcctgcattctnacttaataatacgtttagaacatggccnacaactctnaccagggagaccanantttcatttctttttgaagcaactntggtctccccaaattacnnccttttgcacatnattnatttgaatgcatctcctataaaacca

SEQ ID NO: 5486 - DNA, 104 bp, Homo sapiens
atgcaacttccttgggtgaaatgtcacagcaatatggaagatgcttcactggagttattcacacttcttaatgattaaacttttaaggaactgaaaaaaaaaaa

SEQ ID NO: 5487 - DNA, 388 bp, Homo sapiens
ttatttccttaaggacaacaggatgtaaaacacaaaagacaaatgataaaattggaaaaatatttgcaatgtaccgagtctaaaaccaatcagaaaagggcaaagtgcatgaaaaagctcctgaaggagattctcaagaggacagctagacgggggaggattgcagaaagcttgacatctacagaatgctggagaaatgtgaggttgcttaccctgaagaaatacgggatgacccagaagctcggcctcctgggaaggcagcctgttccctgccatgtgaagtgcgctggcagagatcagaacggcatcctcgaaagcaacccacgattctgcttaactcttggttaatattgaagaggaacttgagatccacagagggaaagtggct

SEQ ID NO: 5488 - DNA, 105 bp, Homo sapiens
atgcaacttccttgggtgaaacgtcacaagcaatatggaagatgcttcactgaagttattcacacttcttaatgattaaacttttaaggaactgaaaaaaaaaaa

SEQ ID NO: 5489 - DNA, 101 bp, Homo sapiens
  misc_feature 26, 40, 64, 69, 85: n = A,T,C or G
catacaccatgacaatctcatcaagncaatcctcaatacncccagcatatgcgctttcttaaancaacntcttctctcacataanctacacttcccatgct

SEQ ID NO: 5490 - DNA, 661 bp, Homo sapiens
  misc_feature 16, 22, 35, 38, 47, 48, 49, 53, 57, 72, 73, 74, 103, 104,112, 116, 134, 136, 169, 208, 227, 233, 243, 246, 249, 279,283, 287, 288, 290, 293, 297, 308, 316, 318, 346, 564, 587,599, 603, 628, 634, 635: n = A,T,C or G
agcctacctaggcatntatagntgcaggaactagnagnaataacctnnnaacnggantgtgatgtcctgaannngcactacacaataatataggcacaaaaanncctcatanttgnatccaatgcctacatgantntagaagtgcactggatcctccatcatggactanatcatagtacgacggcagactgcaacgaggggaagacanctcttgcccttgaaaccanggactnaaagaccccnagnggnctagtcccacacattggctcgtcgtagaanaggncacnncnggnattngccattccctngcctcctnanccgttgtagacccgccaatggtcgcacntactctatttccttgggcgcctaggcacatggaaaacggacaaagatagcaattcgccattgcataggagggcgacttcgtcctagaaacgaaagaacaagtacaaacgccccacgatgtagttgttcgtcgcttacctcatgcatacaagacttgggtggtatccatcaacattaatcaaaagacggctaccaacaacgactaggctccaacaaacntacataaaaaagagataggaacnggtcactctgcnaatntgtgtctcttttgtaagcccaagtntggtgnntaccttttcaaaactcaaaattggcc

SEQ ID NO: 5491 - DNA, 442 bp, Homo sapiens
  misc_feature 369, 421: n = A,T,C or G
tgaacagtaaggagttccttgcaaaagaagaaagccaaataccagtggatgaagtgtttttccacaggtattataaaaaagttgctgttaaagagaaacaaaaacgggatgcagatgaagaaagtatagaagacgtggatgatgaagaatttgaagagctgattgacacatttgaagatgataactgtttcagctctggaaaggatgatatggattttgctggaaacgtgaaaaagagaacaaaaggagctaaggataacacattagatgaagattcagaaggtagtgatgatgaacttggtaacctggatgacgatgaagtttctttaggaagtatggatgatgaagaatttgctgaagttgatgaanatggaggaacattcatggatgtgttagatgatgaaagtgagaaccgttccanaacttgaagtccactccaaag

SEQ ID NO: 5492 - DNA, 203 bp, Homo sapiens
  misc_feature 16, 19, 34, 46, 52, 86, 93, 113, 125, 137, 138, 139, 148,160, 162, 167, 172, 174, 187: n = A,T,C or G
gacctacatcatgatncgntcttacaatcatctngacctagatatncttcanctatgctggacattcctcttccaaggaaatcacnacacacnagcacccatatattctcgtntcatcttggctnacattgtgcctnnntattccacngccatcgagcgntnccacntcatncngttccattaccanactccctagcctaatt

SEQ ID NO: 5493 - DNA, 105 bp, Homo sapiens
  misc_feature 18, 19, 34, 42, 47, 58, 69, 80, 84: n = A,T,C or G
ctattattcttaatttcnnttctttttcttaatnttttcggncctcncctttttattnccttctgaggnccccccctttnaaanccctttgggggtgccccaaaa

SEQ ID NO: 5494 - DNA, 175 bp, Homo sapiens
  misc_feature 34, 37, 39, 40, 47, 50, 51, 54, 58, 61, 75, 76: n = A,T,C or G
cagtcttaacacaatcattttaacctgtccttcncananncgtgtangannctncaanccnaacattcctcaacnntactactacaggaacataatacctgctgaaggggctgctgacaaacatcacccacagatgtgcctctagaaagctgtttctactataagcgtcagaaca

SEQ ID NO: 5495 - DNA, 208 bp, Homo sapiens
  misc_feature 31, 69, 100, 136, 164, 184, 189: n = A,T,C or G
tcggacgagcatgttcatcaaatgtgctganaaccctctgcacctctccacgttgcccatgcccatttnctggcatgaagaaggaaaatcatgctgaagngggcttgcacgacaatacatcaccccacagtatggngcctctagaaagctgtttctactattangacggtccatgacatgccancactncttacgagcgcggacaata

SEQ ID NO: 5496 - DNA, 120 bp, Homo sapiens
  misc_feature 25, 29, 54, 60, 84, 87, 101: n = A,T,C or G
gcccaactcatctgctgatgcctcngatnaatcactgctcactgggcaatggtnaactgngccccactgcctggacgagcatcntcnttgaaggagatagnaaccctctgacacctgtcc

SEQ ID NO: 5497 - DNA, 153 bp, Homo sapiens
gtatcacaagatgtcgtaagaatctgaatcctccaaaagacagatgatgcggaggttcctgggggaatcaaagagaaatgtgcctcatttgccatttgagaaaatgcagtctggtgtattcagtaatatatagtaaagtaataatgataaaat

SEQ ID NO: 5498 - DNA, 548 bp, Homo sapiens
  misc_feature 16, 38, 64, 101, 487, 523, 532: n = A,T,C or G
ttaagtccagaaactngagccaacttcttgaagctggnctttgggaatcctaaattctttcccnaatttcattggcccacaaaggccccaaacttcaatcnagcttggaataacccttggaggggaatggaatcccaacttggcttcaacttggaagccggtggggtccaagggggaaggccggcccggcttggtccggggaacggaaggccaattcttttcaatcaaaaaatggtggcttggaggaaaccccttcttggcaacccttcttcccaacggtttggcccccaatggcccccaattttcccttgggccaggaaaagaaaggggaaaaaaaccaatggccttggaaagggggggccttggcttggaccaaaaacaattcaacccccaccaagaattggtggccttcttaagaaaaggcttgggtttcttacttattaaaggcggtccaagaacaatggcccaccacttcttaagaaggggnggaccattaattccatttttttttttgaagccaagnggtttttcntccaaaattaattggc

SEQ ID NO: 5499 - DNA, 298 bp, Homo sapiens
  misc_feature 46, 60, 88, 92, 100, 104, 107, 110, 114, 117, 133, 158, 196,265: n = A,T,C or G
gtttggccgctgacgagcaccagcaggatatgaggaggaaggagangtggaggtcagtgnggtcattctcaccaatttctttttgganttantttcaagntcantgnaanttgnatntcaaggcaaaaatganttcattggttcattaactggaaaanctggatctgatctttggaagaaggatttggaacataantgactgtacctttaatgaaaagattaacaatgcttcagagctgaattgccctggatttgtttagaatangccttgcgttttgcttttttgaggaggacttac

SEQ ID NO: 5500 - DNA, 335 bp, Homo sapiens
ggttccaacaatctttgtacaagctggagttgtctcctccacatactccgcacttgtcatactgcagctttgagccaatggtgccgtcacagccagttctcacacacttcccccggacgcagacggaattactgtacggcctacattcagtgccatcggtcacctgaatcatggcaaatgcattaggagtgggaaatgtttgcatcagtatttgctcctttggtcaactaagaacctccttccataaactctccaaagcctccttcttggcatcctcttgtgatgtagcagagcaaggaaccccagacacggaaagttgcttaccaaaaaaaaaa

SEQ ID NO: 5501 - DNA, 182 bp, Homo sapiens
ctgccacgccttccacctgcccctgcagtctggcggctcttctcctggactctccgcctggatccccgagccttttcttcttgctctggagtacgcggctcttgcgccccctcgcggcgtgattttcccaacgcacggagtcctggacggataaagcagcacccatcccccaaaaaaaaaaa

SEQ ID NO: 5502 - DNA, 104 bp, Homo sapiens
atgcaacttccttgggtgaaatgtcacagcaatatggaaggtgcttcactgaagttattcacacttcttaatgattaaacttttaaggaactgaaaaaaaaaaa

SEQ ID NO: 5503 - DNA, 402 bp, Homo sapiens
  misc_feature 20, 50, 51, 83, 102, 135, 136, 141, 163, 170, 175, 179, 200,202, 204, 208, 222, 228, 235, 242, 256, 257, 261, 271, 277,282, 288, 289, 290, 297, 313, 318, 322, 325, 329, 342, 343,351, 353, 384: n = A,T,C or G
ggggacccctgcttaatcanaactgatgggcttcaacaagcgtgcacctnnggcactcaaagaaattccctaaatttgccatnaatgaaatgggaacttttnatgtgcgcattgactgccaggctcaacaaagcnntttgngcccaaatgagataacagaatngtgcacntaccnaatncgtggtgccggattgtgccanananacgnaggtgaggatgaangaatgnaccaaanaaagctntatacttttctttnnaccnattttaccanaaatgnaacantttttnnnaaaaatngttccaagaacaggcntcgantggntgngaangaacaaacgtaannccgctttntnccgttctatgaattgcaaaaatatgaggttncttagaattttggccctt

SEQ ID NO: 5504 - DNA, 104 bp, Homo sapiens
atgcaacttccttgggtgaagtgtcacagcaatatggaagatgcttcactgaagttattcacacttcttaatgattaaacttttaaggaactgaaaaaaaaaaa

What is claimed is:

1. An isolated polynucleotide comprising at least 25 contiguous nucleotides of any of SEQ ID NOS:10-5,504, or the complement thereof.

2. The isolated polynucleotide of claim 1, comprising at least 60 contiguous nucleotides of any of SEQ ID NOS:10-5,504, or the complement thereof.

3. The isolated polynucleotide of claim 2, comprising the nucleotide sequence of any of SEQ ID NOS:10-5,504, or the complement thereof.

4. A combination comprising a plurality of cDNAs, wherein said plurality of cDNAs comprises any 15 of SEQ ID NOS:10-5,504, or the complement thereof.

5. The combination of claim 4, wherein said plurality of cDNAs comprises any 25 of SEQ ID NOS:10-5,504, or the complement thereof.

6. The combination of claim 5, wherein said plurality of cDNAs comprises any 50 of SEQ ID NOS:10-5,504, or the complement thereof.

7. The combination of claim 6, wherein said plurality of cDNAs consists of SEQ ID NOS:10-5,504, or the complements thereof.

8. The combination of claim 4, wherein said plurality of cDNAs are immobilized on a substrate.

9. A computer-based system for identifying an exon sequence of the human genome, comprising:
a) a data storage means comprising the nucleotide sequence of any of SEQ ID NOS:10-5,504, or the complement thereof; and
b) search means for comparing a target genomic nucleotide sequence of the human genome to the nucleotide sequence of said data storage means to identify a homologous sequence, wherein the presence of a homologous sequence identifies an exon sequence of the human genome.
